(19) United States
(12) Patent Application Publication
(10) Pub. No.: US 2007/0117186 A1
(43) Pub. Date: May 24, 2007

(54) Highly efficient secretory signal peptide and a protein expression system using the peptide thereof

(75) Inventors: Takehiko Sahara, Hokkaido (JP); Takako Gouda, Hokkaido (JP); Yuki Tochigi, Hokkaido (JP); Satoru Ohgiya, Hokkaido (JP)

Correspondence Address: SUGHRUE MION, PLLC, 2100 Pennsylvania Avenue, N.W., Washington, DC, 20037-3213, US

(73) Assignee: NATIONAL INSTITUTE OF ADVANCED INDUSTRIAL SCIENCE AND TECHNOLOGY

(21) Appl. No.: 11/603,035

(22) Filed: Nov. 22, 2006

(30) Foreign Application Priority Data
Nov. 24, 2005 (JP) 2005-339383
Nov. 1, 2006 (JP) 2006-297923

(51) Int. Cl. C07K 14/47; C07H 21/04; C12P 21/06; C12N 15/74; C12N 1/18

(52) U.S. Cl. 435/69.1; 435/254.21; 435/483; 530/350; 536/23.5

(57) ABSTRACT

This invention is directed to the identification of secretory signal peptides exhibiting higher secretion efficiency than conventional secretory signal peptides. Secretory signal peptides exhibiting higher secretion ability than the secretory signal peptides used in conventional membrane and secretory protein expression systems are identified and isolated from membrane proteins and secretory proteins existing in the Saccharomyces cerevisiae genome.

### TECHNICAL FIELD

[0001] The present invention relates to secretory signal peptides exhibiting higher secretion efficiency than conventional secretory signal peptides, for example.

### BACKGROUND ART

[0002] Up to the present, a variety of proteins have been expressed and produced with the use of a variety of hosts, such as E. coli, yeast, insect cell, or animal cell. Among such protein production systems, the E. coli host is one of the most commonly used hosts. When proteins derived from animals such as humans are produced in E. coli hosts, however, these proteins are often insolubilized, and such insolubilized proteins are expressed as denatured proteins or cannot be expressed in some cases.

[0003] In contrast, protein production systems involving the use of cultured cell hosts, such as insect or animal cell hosts, are capable of producing proteins derived from animals such as humans as properly folded proteins with high probability. These protein production systems utilizing cultured cell hosts, however, suffer from the following drawbacks: (1) high culture cost; (2) slow growth; and (3) difficulty of enlarging the culture scale.

[0004] When yeast, i.e., a unicellular eukaryote, is used as a host cell of a protein production system, proteins derived from animals such as humans can be expressed as properly folded proteins with relatively high probability, as with cases involving the use of cultured cells. As with cases of microorganisms such as E. coli, culture utilizing a yeast host can be carried out in a less expensive manner, in terms of culture equipment, culture duration, and medium cost, than culture utilizing cultured cells. Since budding yeast, Saccharomyces cerevisiae, is used in the production of alcohol beverages such as beer or wine or fermented foods such as bread, the safety of yeast as an organism has been confirmed. Also, sequencing of the yeast genome was completed earlier than that of other eukaryotes, and yeast has an excellent molecular biological background, i.e., well-organized genomic information is available.

[0005] Thus, yeast had been extensively utilized as a host for production system of endogenous/exogenous proteins, with the utilization of recombinant DNA techniques.

[0006] As described above, expression and production of a variety of proteins, including human-derived proteins, have been heretofore attempted. Compared with the intracellular expression of soluble proteins, it is generally known that expression of membrane proteins and secretory proteins is difficult. This is because many membrane proteins and secretory proteins are required to mature as functional proteins by various types of modifications in a protein intracellular transportation system through endoplasmic reticulum/Golgi bodies from cytoplasm.

[0007] In the research for development of new drugs, functional/structural analysis of human membrane proteins and secretory proteins is important. Such analysis requires highly efficient expression systems for membrane proteins and secretory proteins. In the case of the extracellular expression of secretory proteins, purification of expressed proteins can be carried out more easily than in the case of intracellular proteins, and degradation caused by intracellular proteases can be inhibited. Because of such advantages, extracellular expression of secretory proteins is regarded important in the industrial production of proteins. In addition to the aforementioned advantages, yeast advantageously has an intracellular protein transportation system similar to that of animal cells. Thus, expression of membrane proteins and secretory proteins derived from animals is relatively easier than that involving the use of prokaryotic hosts.

[0008] In general, membrane proteins or secretory proteins comprise at their N termini secretory signal peptides. It is reported that substitution of the secretory signal peptides of the membrane proteins or secretory proteins with secretory signal peptides exhibiting high secretion efficiency, including those derived from hosts, can enhance the expression efficiency and the success rate of expression of such membrane proteins or secretory proteins in a protein expression system. In order to improve the efficiency of membrane and secretory protein expression systems, it is critical to improve the secretion efficiency of secretory signal peptides. Examples of signal peptides of membrane proteins and secretory proteins derived from Saccharomyces cerevisiae or yeast viruses that are used in conventional membrane and secretory protein expression systems in yeast include secretory signal peptides derived from α-factor (Non-Patent Document 1), α-factor receptor (Non-Patent Document 2), preprotoxin, SUC2 proteins and PHO5 proteins (Non-Patent Document 3), BGL2 proteins (Non-Patent Document 4), and AGA2 proteins (Non-Patent Document 5). However, only a few secretory signal peptides have been used for the expression of membrane proteins and secretory proteins in the past. Accordingly, it is unknown whether or not such secretory signal peptides used so far exhibit the highest level of efficiency.

[0009] Computer programs that predict the sequences of secretory signal peptides have been provided. Examples of such computer programs include SOSUI signal Beta (http://sosui.proteome.bio.tuat.ac.jp/˜sosui/protcome/sosuisignal/sosuisignal_submit.html), SignalP (http://www.cbs.dtu.dk/services/SignalP/), PSORT (http://psort.nibb.ac.jp/), and Phobius (http://phobius.cgb.ki.se/). Use of these computer programs enables the prediction of the presence of the sequences of the secretory signal peptides in membrane proteins and secretory proteins based on the genomic information. At present, however, it is difficult to predict the efficiency of each secretory signal peptide with the use of these computer programs. Specifically, it is impossible to predict whether or not a predicted secretory signal peptide can actually be used to express proteins such as membrane proteins and secretory proteins and whether or not such peptide could be used for efficient mass-production of proteins.

[0010] In the past, the present inventors developed an expression system in yeast at low temperature by analyzing the response mechanism of Saccharomyces cerevisiae at low temperature (Patent Documents 1 and 2 and Non-Patent Document 6). The present inventors conducted an experiment concerning the expression of human proteins with the use of this expression system. As a result, they found that this expression system could more effectively inhibit the insolubilization of expressed proteins and the degradation caused by proteases at low temperature and would yield higher expression efficiency with the use of low-temperature-inducible promoters that are induced by low-temperature stimuli, compared with the conventional expression systems involving budding yeast at moderate temperature. In the present expression system, however, the expression efficiency of membrane proteins and secretory proteins were lower than that of the soluble proteins in yeast cells.

[0011] Patent Document 1: WO 2004/003197;

[0012] Patent Document 2: JP Patent Publication (Kokai) No. 2005-160357 A;

[0013] Non-Patent Document 1: M. K. Ramjee, J. R. Petithory, J. McElver, S. C. Weber, and J. F. Kirsch., A novel yeast expression/secretion system for the recombinant plant thiol endoprotease propapain, Protein Engineering, 1996, vol. 9, pp. 1055-1061;

[0014] Non-Patent Document 2: V. Sarramegna, F. Talmont, P. Demange, and A. Milon, Heterologous expression of G-protein-coupled receptors: comparison of expression systems from the standpoint of large-scale production and purification, Cellular and Molecular Life Sciences, 2003, vol. 60, pp. 1529-1546;

[0015] Non-Patent Document 3: A. Eiden-Plach, T. Zagorc, T. Heintel, Y. Carius, F. Breinig, and M J. Schmitt, Viral preprotoxin signal sequence allows efficient secretion of green fluorescent protein by Candida glabrata, Pichia pastoris, Saccharomyces cerevisiae, and Schizosaccharomyces pombe., Applied and Environmental Microbiology, 2004, vol. 70, pp. 961-966;

[0016] Non-Patent Document 4: T. Achstetter, M. Nguyen-Juilleret, A. Findeli, M. Merkamm, and Y. Lemoine, A new signal peptide useful for secretion of heterologous proteins from yeast and its application for synthesis of hirudin., Gene, 1992, vol. 110, pp. 25-31;

[0017] Non-Patent Document 5: D. Huang and E V. Shusta, Secretion and surface display of green fluorescent protein using the yeast Saccharomyces cerevisiae., Biotechnology Progress, 2005, vol. 21, pp. 349-357;

[0018] Non-Patent Document 6: T. Sahara, T. Goda, and S. Ohgiya, Comprehensive expression analysis of time-dependent genetic response in yeast cells to low temperature., Journal of Biological Chemistry, 2002, vol. 277, pp. 50015-50021

### DISCLOSURE OF THE INVENTION

[0019] As described above, the expression of membrane proteins and secretory proteins requires the use of secretory signal peptides exhibiting high secretion efficiency.

[0020] Accordingly, it is an object of the present invention to identify and provide secretory signal peptides exhibiting higher efficiency of transportation to cell organelles, including cell membranes, endoplasmic reticulum, and Golgi bodies, and higher efficiency of extracellular secretion, than conventional secretory signal peptides, for example.

[0021] The present inventors have conducted concentrated studies in order to attain the above object. As a result, they succeeded in discovering secretory signal peptides exhibiting a higher ability for transportation to cell organelles, including cell membranes, endoplasmic reticulum, and Golgi bodies, and a higher ability for extracellular secretion under moderate and low temperature conditions, than secretory signal peptides used in conventional membrane and secretory protein expression systems, from membrane proteins and secretory proteins existing in the Saccharomyces cerevisiae genomes, with the use of low-temperature-inducible promoters (Patent Document 1 and Non-Patent Document 6) and a reporter assay system involving the use of secretory luciferase as a reporter protein (International Application Number: PCT/JP2006/311597, claiming the priority right of JP Patent Application No. 2005-169768). This has led to the completion of the present invention.

[0022] The present invention includes the following.

[0023] (1) DNA encoding the following secretory signal peptide (a) or (b):

[0024] (a) a secretory signal peptide consisting of the amino acid sequence as shown in any one of SEQ ID NO: 2, 4, 6, 8, 10, 12, 14, 16, and 18; or

[0025] (b) a secretory signal peptide consisting of an amino acid sequence derived from the amino acid sequence of the secretory signal peptide (a) by deletion, substitution, or addition of one or several amino acids and having secretory signal activity at 30° C.

[0026] (2) DNA according to (1), wherein said DNA is any one of the following DNA (a) to (c) encoding a secretory signal peptide:

[0027] (a) DNA consisting of the nucleotide sequence as shown in any one of SEQ ID NO: 1, 3, 5, 7, 9, 11, 13, 15, and 17;

[0028] (b) DNA consisting of a nucleotide sequence derived from DNA (a) by deletion, substitution, or addition of one or several nucleotides and encoding a secretory signal peptide having secretory signal activity at 30° C.; and

[0029] (c) DNA hybridizing under stringent conditions with DNA consisting of a nucleotide sequence complementary to DNA (a) and encoding a secretory signal peptide having secretory signal activity at 30° C.

[0030] (3) A secretory signal peptide encoded by DNA according to (1) or (2).

[0031] (4) An expression vector comprising DNA according to (1) or (2) and a foreign gene.

[0032] (5) A transformant transformed by the expression vector according to (4).

[0033] (6) The transformant according to (5), wherein the host is yeast.

[0034] (7) The transformant according to (6), wherein the yeast is Saccharomyces cerevisiae.

[0035] (8) A method for producing a protein, wherein the transformant according to any one of (5) to (7) is cultured at 20° C. to 42° C.

[0036] (9) DNA encoding the following secretory signal peptide (a) or (b):

[0037] (a) a secretory signal peptide consisting of the amino acid sequence as shown in any one of SEQ ID NO: 2, 4, 6, 8, 10, 12, 14, 16, 18, 20, 22, 24, 26, 28, 30, 32, 34, 36, 38, 40, 42, 44, 46, 48, 50, 52, 54, 56, 58, 60, 62, 64, 66, 68, 70, 72, 74, 76, 78, 80, 82, 84, 86, 88, 90, 92, 94, 96, 98, 100, and 102; or

[0038] (b) a secretory signal peptide consisting of an amino acid sequence derived from the amino acid sequence of the secretory signal peptide (a) by deletion, substitution, or addition of one or several amino acids and having secretory signal activity at 15° C.

[0039] (10) DNA according to (9), wherein said DNA is any one of the following DNA (a) to (c) encoding a secretory signal peptide:

[0040] (a) DNA consisting of the nucleotide sequence as shown in any one of SEQ ID NO: 1, 3, 5, 7, 9, 11, 13, 15, 17, 19, 21, 23, 25, 27, 29, 31, 33, 35, 37, 39, 41, 43, 45, 47, 49, 51, 53, 55, 57, 59, 61, 63, 65, 67, 69, 71, 73, 75, 77, 79, 81, 83, 85, 87, 89, 91, 93, 95, 97, 99, and 101;

[0041] (b) DNA consisting of a nucleotide sequence derived from DNA (a) by deletion, substitution, or addition of one or several nucleotides and encoding a secretory signal peptide having secretory signal activity at 15° C.; and

[0042] (c) DNA hybridizing under stringent conditions with DNA consisting of a nucleotide sequence complementary to DNA (a) and encoding a secretory signal peptide having secretory signal activity at 15° C.

[0043] (11) A secretory signal peptide encoded by DNA according to (9) or (10).

[0044] (12) An expression vector comprising DNA according to (9) or (10) and a foreign gene.

[0045] (13) A transformant transformed by the expression vector according to (12).

[0046] (14) The transformant according to (13), wherein the host is yeast.

[0047] (15) The transformant according to (14), wherein the yeast is Saccharomyces cerevisiae.

[0048] (16) A method for producing a protein, wherein the transformant according to any one of (13) to (15) is cultured at 0° C. to 20° C.

[0049] This specification includes part or all of the contents as disclosed in the specification and/or drawings of each of Japanese Patent Applications Nos. 2005-339383 and 2006-297923, which are priority documents of the present application.

### PREFERRED EMBODIMENTS OF THE INVENTION

[0050] Hereafter, the present invention is described in detail.

[0051] DNA encoding a secretory signal peptide according to the present invention can be identified by identifying a gene encoding a protein containing the secretory signal peptide derived from Saccharomyces cerevisiae. At the outset, 1,037 genes included in the categories of the plasma membrane, the integral membrane, the cell periphery, the cell wall, the extracellular, the endoplasmic reticulum (ER), and Golgi from the subcellular localization table of MIPS CYGD (http://mips.gsf.de/genre/proj/yeast/), which is the Saccharomyces cerevisiae (budding yeast) genomic database, are selected. Based on the amino acid sequences encoded by the nucleotide sequences of the genes selected from the database, the transmembrane sites and the secretory signal peptides are then predicted using the prediction programs for transmembrane domains and the prediction programs for the secretory signal peptides, TMHMM 2.0 (http://www.cbs.dtu.dk/services/TMHMM/), Phobius (http://phobius.cgb.ki.se/), SOSUI signal Beta (http://sosui.proteome.bio.tuat.ac.jp/˜sosui/proteome/sosuisignal/sosuisignal_submit.html), and SignalP 3.0 (http://www.cbs.dtu.dk/services/SignalP/). Based on the results of this analysis, the gene regions encoding secretory signal peptides are extracted from the aforementioned database via several prediction programs, concerning the genes, for which the secretory signal peptides have been predicted.

[0052] Further, a reporter gene containing a DNA fragment in which a secretory luciferase gene lacking the original secretory signal peptide has been ligated downstream of the gene region encoding the predicted secretory signal peptide is prepared, and reporter assay (International Application Number: PCT/JP2006/311597, claiming the priority right of JP Patent Application No. 2005-169768) is carried out using the resulting reporter gene to identify the secretory signal peptide having secretion ability that is more than twice, at moderate temperature (30° C.) and low temperature (15° C.), that of the secretory signal peptide (the α-factor-derived secretory signal peptide (Non-Patent Document 1)) used in conventional membrane and secretory protein expression systems, with the use of extracellular luciferase activity as an indicator.

[0053] As a result, 9 genes containing novel gene regions encoding secretory signal peptides having high secretion ability at moderate temperature were identified. The identified genes are shown in Table 1.

TABLE 1

Secretory signal peptides having secretion ability more than twice that of the α-factor-derived
secretory signal peptide at moderate temperature (30° C.)

| | | | | | | |
|---|---|---|---|---|---|---|
| | | Secretion | | | | |
| | | efficiency relative | | | | |
| | | to α-factor- | | SEQ | | SEQ |
| Systematic | Common | derived secretory | | ID | | ID |
| gene name | gene name | signal peptide | Amino acid sequence | NO: | Nucleotide sequence | NO: |

| | | | | | | | |
|---|---|---|---|---|---|---|---|
| 1 | YDR420w | HKR1 | 5.64 | MVSLKIKKLLLVSLLNAIEAYSNDTI | 2 | ATGGTCTCATTGAAAATAAAAAAAATT | 1 |
| | | | | YSTSYNNGIESTPSYSTSAISSTGSS | | TTACTCCTGGTGTCATTGTTAAATGCA | |
| | | | | NKENAITSSSETTTMAGDYGESGSTT | | ATCGAGGCCTATAGTAACGATACAATA | |
| | | | | IMDEQETGTSSQYISVTTTTQ | | TATTCAACTTCATACAATAATGCAATA | |
| | | | | | | GAAAGCACACCCTCATATTCAACATCC | |
| | | | | | | GCGATATCCAGTACCGGATCTAGCAAC | |
| | | | | | | AAAGAGAATGCAATAACATCAAGCTCT | |
| | | | | | | GAAACCACCACAATGGCTGGCCAATAT | |
| | | | | | | GGTGAAAGTGGAAGCACAACAATAATG | |
| | | | | | | GATGAACAAGAAACTGGTACGTCCAGC | |
| | | | | | | CAGTATATTAGTGTGACGACGACAACG | |
| | | | | | | CAA | |
| 2 | YBR187w | | 3.37 | NGGNMAIKKASLIALLPLFTAAAAAA | 4 | ATGGGAAATATGATAAAGAAGGCATCT | 3 |
| | | | | TDAETSNESGSSSHLKS | | TTAATAGCCCTCCTACCGCTGTTCACC | |
| | | | | | | GCCGCAGCCGCTGCAGCTACTGATGCG | |
| | | | | | | GAGACATCTATGGAATCTGGGAGTTCT | |
| | | | | | | TCACATTTGAAGTCT | |
| 3 | YGL126w | SCS3 | 3.27 | NSSKNFNAIHLLVCPLTVLVGYLMNAY | 6 | ATGTCTAGCAAATGGTTTAATGCTATA | 5 |
| | | | | GYGAALQATLNKDGLVNAMLVKKG | | CACCTACTGGTGTGCCCGTTGACGGTA | |
| | | | | | | CTGGTAGGATATCTCATGAACGCGTAT | |
| | | | | | | GGCTACGGTGCGGCGCTGCAAGCAACC | |
| | | | | | | CTGAATAAGGATGGTCTGGTAAATGCT | |
| | | | | | | ATGTTGGTAAAGAAAGGG | |
| 4 | YHR139c | SPS100 | 2.69 | MKFTSVLAFFLATLTASATFLYKRQN | 8 | ATGAAATTCACATCAGTGCTAGCATTT | 7 |
| | | | | VTSGGGTVPIITGGPAVSGSQSNVTT | | TTTCTTGCAACTTTAACAGCTTCTGCA | |
| | | | | TTLFNSTSTLNITQLYQIATDVNDTL | | ACACCACTTTACAAGAGGCAGAACGTT | |
| | | | | QSESSS | | ACTTCTGGCGGCAGGTACGGTCCCCGT | |
| | | | | | | GATCATCACGGGTGGACCTGCTGTATC | |
| | | | | | | TGGTAGCCAGTCAAACGTTACTACCAC | |
| | | | | | | AACGCTATTCAACTCTACTTCCACCTT | |
| | | | | | | AAACATCACTCAACTTTACCAAATTGC | |
| | | | | | | TACTCAAGTTAATCAGACTTTACAAAG | |
| | | | | | | CGAATCGTCTTCC | |
| 5 | YGR014w | MSB2 | 2.66 | MQFPFACLLSTLVISGSLARASPFDF | 10 | ATGCAGTTTCCATTCGCTTGTCTCCTA | 9 |
| | | | | IFGNGTQQAQSQSESQGQVSFTNEAS | | TCGACCCTTGTAATTAGTGGGTCATTG | |
| | | | | QDSSTTSLVTAYSQGVHSHQSATIVS | | GCCCGGGCCAGCCCCTTCGACTTTATA | |
| | | | | ATISSLPSTWYDASSTSQTSVS | | TTCGGCAATGGAACGCAACAAGCTCAG | |
| | | | | | | AGCCAAAGCGAGAGTCAAGGTCAAGTT | |
| | | | | | | TCTTTCACCAATGAAGCTTCTCAGGAT | |
| | | | | | | AGTTCCACCACCTCTTTGGTAACAGCC | |
| | | | | | | TATTCTCAAGGTGTTCATTCGCACCAG | |
| | | | | | | TCTGCAACAATAGTGAGTGCCACAATC | |
| | | | | | | TCTTCCCTCCCATCTACTTGGTATGAT | |
| | | | | | | GCGAGCTCCACTTCCCAGACTTCTGTG | |
| | | | | | | TCA | |
| 6 | YBR078w | ECM33 | 2.48 | MQFKNALTATAILSASALAANSTTSI | 12 | ATGCAATTCAAGAACGCTTGACTGCTA | 11 |
| | | | | PSSCSIGTSATATAQADLDKISQCST | | CTGCTATTCTAAGTGCCTCCGCTCTAG | |
| | | | | IVGNLTITGDLGSAALASIQEIDGSL | | CTGCTAACTCAACTACTTCTATTCCAT | |
| | | | | TIFNSSSLSSFSADIKKI | | CTTCATGTAGTATTGGTACTTCTGCCA | |
| | | | | | | CTGCTACTGCTCAAGCTGATTTGGACA | |
| | | | | | | AAATCTCCGGTTGTAGTACCATTGTTG | |
| | | | | | | GTAACTTGACCATCACCGGTGACTTGG | |
| | | | | | | GTTCCGCTGCTTTGGCTAGTATCCAAG | |
| | | | | | | AGATTGATGGTTCCTTGACTATCTTCA | |
| | | | | | | ACTCCAGTTCTTTATCTTCTTTCTCCG | |
| | | | | | | CTGACTCTATGAAGAAAATC | |
| 7 | YNL300w | TOS6 | 2.46 | MKFSTLSTVAAIAAFASADSTSDGVT | 14 | ATGAAATTCTCTACTCTCTCCACCGTT | 13 |
| | | | | YVDVTTTPQSTTSMVSTVKTTSTPYT | | GCTGCCATTGCCGCATTTGCTTCCGCA | |
| | | | | TSTIATLSTKSISSQANTTTHEIST | | GATTCCACCTCTGATGGTGTCACTTAC | |
| | | | | | | GTAGATGTTACCACCACCCCACAAAGT | |
| | | | | | | ACTACATCTATGGTCTCCACCGTGAAA | |
| | | | | | | ACTACTTCCACTCCATACACTACAAGT | |
| | | | | | | ACCATTGCCACTCTATCCACTAAATCT | |
| | | | | | | ATCAGTAGCCAAGCTAACACCACCACC | |
| | | | | | | CATGAGATCAGCACA | |
| 8 | YLR084c | RAX2 | 2.27 | MFVHRLWTLAFPFLVEISKASQLENI | 16 | ATGTTTGTTCATCGTCTCTGGACACTC | 15 |
| | | | | KSLLDIEDNVLPNLNISQNNSNAVQI | | GCATTTCCTTTTCTTGTGGAGATATCG | |
| | | | | LGGVDALSFYEYTGQQNFTKEIGPET | | AAGGCATCACAGTTGGAGAATATTAAA | |
| | | | | SSHGLVYYSNNTYIQLEDASDD | | TCTCTTCTGGACATCGAAGATAATGTG | |
| | | | | | | CTACCGAATTTGAATATATCGCAAAAT | |
| | | | | | | AATAGCAACGCAGTACAAATCCTCGGG | |
| | | | | | | GGTGTGGACGCCTTATCTTTTTACGAG | |
| | | | | | | TACACAGGCCAACAAAATTTCACTAAA | |
| | | | | | | GAAATAGGTCCAGAAACAAGCTCACAT | |
| | | | | | | GGATTAGTTTATTACTCTAACAACACC | |
| | | | | | | TATATCCAGTTGGAAGATGCCTCTGAT | |
| | | | | | | GAT | |
| 9 | YMR008c | PLB1 | 2.04 | MKLQSLLVSAAVLTSLTENVNAMSPN | 18 | ATGAAGTTGCAGAGTTTGTTGGTTTCT | 17 |
| | | | | NSYVPANVTCDDDINLVREASGLSDN | | GCTGCAGTTTTGACTTCTCTAACAGAG | |
| | | | | EYEMLKKRDAYTKE | | AACGTTAACGCTTGGTCACCAAATAAC | |
| | | | | | | AGTTACGTCCCTGCGAACGTAACCTGT | |
| | | | | | | GATGATGATATTAACTTAGTCAGAGAA | |
| | | | | | | GCATCTGGTTTGTCAGATAACGAAACA | |
| | | | | | | GAATGGCTGAAAAAAAGAGATGCATAC | |
| | | | | | | ACCAAGGAG | |

[0054] Table 1 shows the systematic and common names of genes from which the gene regions encoding secretory signal peptides are derived, relative secretion efficiency in relation to α-factor-derived secretory signal peptide, the amino acid sequences of the secretory signal peptides, and the nucleotide sequences of the gene regions encoding secretory signal peptides, concerning secretory signal peptides having secretion ability that is more than twice that of α-factor-derived secretory signal peptide at moderate temperature (30° C.). SEQ ID NOs: of the amino acid sequences and those of the nucleotide sequences are indicated in the rightmost column.

[0055] Also, 51 genes containing novel gene regions encoding secretory signal peptides having high secretion ability at low temperature are shown in Table 2.

TABLE 2

Secretory signal peptides having secretion ability more than twice that of the α-factor-derived
secretory signal peptide at moderate temperature (30° C.)

| | | | | | | |
|---|---|---|---|---|---|---|
| | | Secretion | | | | |
| | | efficiency relative | | | | |
| | | to α-factor- | | SEQ | | SEQ |
| Systematic | Common | derived secretory | | ID | | ID |
| gene name | gene name | signal peptide | Amino acid sequence | NO: | Nucleotide sequence | NO: |

| | | | | | | | |
|---|---|---|---|---|---|---|---|
| 1 | YBR243c | ALG7 | 5.76 | NLRLFSLALITCLIYYSKNQGPSALV | 20 | ATGTTGCGACTTTTTTCACTGGCACTT | 19 |
| | | | | AAVGFGIA | | ATCACATGCTTAATCTACTATTCCAAA | |
| | | | | | | AATCAGGGGCCCATCTGCTCTTGTTGC | |
| | | | | | | GGCCGTGGGATTTGGTATAGCA | |
| 2 | YNL237w | YTP1 | 5.67 | NTAANKNIVFGFSRSISAILLICFFF | 22 | ATGACAGCAGCTAATAAGAATATTGTT | 21 |
| | | | | FKVCGDMEHDHGHDDTSGYTRPEIVQ | | CTTCGGATTTTCCAGATCCATTAGCGC | |
| | | | | AGSKS | | AATTCTACTAATATGCTTTTTCTTTGA | |
| | | | | | | AAAAGTCTGCGGTGATATGGAGCATGA | |
| | | | | | | TATGGGCATGGATGATACTTCGGGATA | |
| | | | | | | CACGAGGCCAGAAATTGTGCAGGCTGG | |
| | | | | | | GTCGAAATCT | |
| 3 | YCL043c | PDI1 | 5.61 | MKFSAGAVLSMSSLLLASSVFAQQEA | 24 | ATGAAGTTTTCTGCTGGTGCCGTCCTG | 23 |
| | | | | VAPEDSAVVAKLATDSFNEYIQSHD | | TCATGGTCCTCCCTGCTGCTCGCCTCC | |
| | | | | | | TCTGTTTTCGCCCAACAAGAGGCTGTG | |
| | | | | | | GCCCCTGAAGACTCCGCTGTCGTTAAG | |
| | | | | | | TTGGCCACCGACTCCTTCAATGAGTAC | |
| | | | | | | ATTCAGTCGCACGAC | |
| 4 | YKL096w | CWP1 | 5.55 | MKFSTALSVALFALAKMVIADSEEFG | 26 | ATGAAATTCTCCACTGCTTTGTCTGTC | 25 |
| | | | | LVSIRSGSDLGYLSVYSDNGTLKLGS | | GCTTTATTCGCCTTGGCTAAGATGGTC | |
| | | | | GSGSFEATITDDGKLKFDDDKYAVVN | | ATTGCCGATTCCGAAGAATTCGGCCTG | |
| | | | | EDGSFKEGSESD | | GTGAGTATCCGTTCCCGCTCGGATTTA | |
| | | | | | | CAATACTTGAGTGTTTACAGTGATAAC | |
| | | | | | | GGCACTTTGAAACTTGGCAGCGGTAGT | |
| | | | | | | GGCTCATTTGAGGCAACTATTACCGAT | |
| | | | | | | GACGGTAAACTGAAATTTGACGACGAT | |
| | | | | | | AAGTATGCTGTTGTCAATGAGGATGGC | |
| | | | | | | TCATTCAAAGAAGGTTCTGAGAGCGAT | |
| 5 | YBR078w | ECM33 | 5.17 | MQFKNALTATAILSASALAANSTTSI | 12 | ATGCAATTCAAGAACGCTTTGACTGCT | 11 |
| | | | | PSSCSIGTSATATAQADLDKISGCST | | ACTGCTATTCTAAGTGCCTCCGCTCTA | |
| | | | | IVGNLTITGDLGSAALASIQEIDGLS | | GCTGCTAACTCAACTACTTCTATTCCA | |
| | | | | TIFNSSSLSSFSADSIKKI | | TCTTCATGTAGTATTGGTACTTCTGCC | |
| | | | | | | ACTGCTACTGCTCAAGCTGATTTGGAC | |
| | | | | | | AAAATCTCCGGTTGTAGTACCATTGTT | |
| | | | | | | GGTAACTTGACCATCACCGGTGACTTG | |
| | | | | | | GGTTCCGCTGCTTTGGCTAGTATCCAA | |
| | | | | | | GAGATTGATGGTTCCTTGACTATCTTC | |
| | | | | | | AACTCCAGTTCTTATCTTCTTTCTCCGC | |
| | | | | | | TGACTCTATCAAGAAAATC | |
| 6 | YLR250w | SSP120 | 5.05 | HRFLRGFVFSLAFTLYKVTATAEIGS | 28 | ATGAGGTTTTTGAGGGGATTTGTATTT | 27 |
| | | | | EINVENEAPPDGLSWEEKHCIDHEHQ | | TCTTTGGFCTTTCACTCTATATAAAGT | |
| | | | | LKDYTPET | | AACTGCCACGGCAGAAATAGGATCTGA | |
| | | | | | | AATTAATGTGGAAAATGAGGCACCACC | |
| | | | | | | TGATGGTTTATCCTGGGAGGAGTGGCA | |
| | | | | | | TATGGACCATGAGCATCAGCTAAAAGA | |
| | | | | | | TTACACTCCAGAGACT | |
| 7 | YEL001c | | 4.76 | MRFSNLIGFNLLTALSSFCAAISANN | 30 | ATGAGGTTTTCTATGTTAATCGGGTTT | 29 |
| | | | | SDNVEHEQEVAEAVAPPSINIEVKYD | | AATTTATTAACTGCCTTGAGCAGCTTC | |
| | | | | VVGKESENHDSFLEFYAEDTATLYNV | | TGTGCTGCCATATCAGCTAATAATAGC | |
| | | | | TNHEDTNITIFGVNGTIVTYP | | GACAATGTCGAACATGAACAGGAAGTT | |
| | | | | | | GCGGAGGCGGTAGCGCCACCTTCTATT | |
| | | | | | | AATATAGAGGTGAAATATGATGTCGTT | |
| | | | | | | GGGAAGGAATCAGAAAATCATGATTCT | |
| | | | | | | TTCCTTGAGTTTTACGCGGAGGATACC | |
| | | | | | | GCTACCTTAGCCTATAATGTTACTAAT | |
| | | | | | | TGGGAAGATACTAATATCACAATTTTT | |
| | | | | | | GGTGTCAACGGAACAATTGTTACATAT | |
| | | | | | | CCA | |
| 8 | YMR008c | PLB1 | 4.71 | MKLQSLLVSAAVLTSLTENVNAHSPN | 18 | ATGAAGTTGCAGAGTTTGTTGGTTTCT | 17 |
| | | | | NSYVPANVTCDDDINLVREASGLSDN | | GCTGCAGTTTTGACTTCTCTAACAGAG | |
| | | | | ETEWLKKRDAYTKE | | AACGTTAACGCTTGGTCACCAAATAAC | |
| | | | | | | AGTTACGTCCCTGCGAACGTAACCTGT | |
| | | | | | | GATGATGATATTAACTTAGTCAGAGAA | |
| | | | | | | GCATCTGGTTTGTCAGATAACGAAACA | |
| | | | | | | GAATGGCTGAAAAAAAGAGATGCATAC | |
| | | | | | | ACCAAGGAG | |
| 9 | YNL238w | KEX2 | 4.70 | HKVRKYITLCFVHVAFSTSALVSSQQ | 32 | ATGAAAGTGAGGAAATATATTACTTTA | 31 |
| | | | | IPLKDHTSRQYFAVESNETLSRLEEK | | TGCTTTTGGTGGGCCTTTTCAACATCC | |
| | | | | HPWWKYEKHDVRGLPNHVVFSKELLK | | GCTCTTGTATCATCACAACAAATTCCA | |
| | | | | LGKRSSLEELQGDNNDHILSVHDL | | TTGAAGGACCATACGTCACGACAGTAT | |
| | | | | | | TTTGCTGTAGAAAGCAATGAAACATTA | |
| | | | | | | TCCCGCTTGGAGGAAATGCATCCAAAT | |
| | | | | | | TGGAAATATGAACATGATGTTCGAGGG | |
| | | | | | | CTACCAAACCATTATGTTTTTTCAAAA | |
| | | | | | | GAGTTGCTAAAATTGGGCAAAAGATCA | |
| | | | | | | TCATTAGAAGAGTTACAGGGGGATAAC | |
| | | | | | | AACGACCACATATTATCTGTCCATGAT | |
| | | | | | | TTA | |
| 10 | YLR084c | RAX2 | 4.61 | HFVHRLHTLAFPFLVEISKASQLENI | 16 | ATGTTTGTTCATCGTCTCTGGACACTC | 15 |
| | | | | KSLLDIEDNVLPNKLNISQNNSNAVQ | | GCATTTCCTTTTCTTGTGGAGATATCG | |
| | | | | ILQGVDALSFYEYTGQQNFTKEIGPE | | AAGGCATCACAGTTGGAGAATATTAAA | |
| | | | | TSSHGLVYYSNNTYIQLEDASDD | | TCTCTTCTGGACATCGAAGATAATGTG | |
| | | | | | | CTACCGAATTTGAATATATCGCAAAAT | |
| | | | | | | AATAGCAACGCAGTACAAATCCTCGGG | |
| | | | | | | GGTGTGGACGCCTTATCTTTTTACGAG | |
| | | | | | | TACACAGGCCAACAAAATTTCACTAAA | |
| | | | | | | GAAATAGGTCCAGAAACAAGCTCACAT | |
| | | | | | | GGATTAGTTTATTACTCTAACAACACC | |
| | | | | | | TATATCCAGTTGGAAGATGCCTCTGAT | |
| | | | | | | GAT | |
| 11 | YGR189c | CRH1 | 4.01 | NKVLDLLTVLSASSLLSTFAAAESTA | 34 | ATGAAAGTGCTTGACCTACTAACGGTA | 33 |
| | | | | TADSTTAASSTASCNPLKTTGCTPDT | | CTCAGTGCCTCTTCATTATTATCTACA | |
| | | | | ALATSFSEDFSSSSK | | TTCGCGGCTGCCGAAAGTACTGCTACT | |
| | | | | | | GCAGACAGTACAACTTGCAGCTTCTAG | |
| | | | | | | CACTGCTTCGTGTAACCCGTTAAAAAC | |
| | | | | | | TACAGGTTGTACGCCGGATACAGCTTT | |
| | | | | | | GGCAACTAGTTTTAGCGAAGATTTCTC | |
| | | | | | | ATCTTCATCCAAA | |
| 12 | YLR286c | CTS1 | 3.95 | MSLLYIILLFTQFLLLPTDAFDRSAN | 36 | ATGTCACTCCTTTACATCATTCTTCTA | 35 |
| | | | | TNIAVYVSQGNASAGTQESLATYCES | | TTCACACAATTCTTACTACTGCCAACC | |
| | | | | SDAD | | GATGCCTTTGATAGGTCTGCTAACACA | |
| | | | | | | AATATTGCTGTTTATTGGGGTCAAAAC | |
| | | | | | | TCAGCAGGAACGCAAGAATCCTTAGCT | |
| | | | | | | ACTTACTGTGAATCTTCTGATGCTGAT | |
| 13 | YMR006c | PLB2 | 3.78 | HQLRNILQASSLISGLSLAADSSSTT | 38 | ATGCAATTACGGAACATATTACAGGCT | 37 |
| | | | | GDGYAPSIIPCPSDDTSLVRNASGLS | | AGCTCGCTAATTTCTGGACTTTCGCTC | |
| | | | | TEATDRLKKRDAYTKEALHSFLSRAT | | ACTGCAGATTCGTCGTCCACTACTGGT | |
| | | | | SNFSDTSLLSTLFSSNSSN | | GATGGTTATGCTCCATCAATAATTCCT | |
| | | | | | | TGTCCCAGTGATGATACCTCTTTAGTT | |
| | | | | | | AGAAACGCGTCTGGCTTATCTACCGCT | |
| | | | | | | GAAACTGATTGGTTAAAGAAAAGAGAT | |
| | | | | | | GCGTACACTAAAGAAGCTTTACATTCC | |
| | | | | | | TTCTTAAGCAGAGCTACTTCTAACTTC | |
| | | | | | | AGTGACACTTCTTTGCTATCCACTCTT | |
| | | | | | | TTCAGTAGTAACTCTTCCAAT | |
| 14 | YKL096w-a | CWP2 | 3.70 | MQFSTVASVAFVALNFVAAESAAAIS | 40 | ATGCAATTCTCTACTGTCGCTTCCGTT | 39 |
| | | | | QITDQIQATTTATTEATTTAAPSSTV | | GCTTTCGTCGCTTTGGCTAACTTTGTT | |
| | | | | ETVSPSSTETISQQTEN | | GCCGCTGAATCCGCTGCCGCCATTTCT | |
| | | | | | | CAAATCACTGACGGTCAAATCCAAGCT | |
| | | | | | | ACTACCACTGCTACCACCGAAGCTACC | |
| | | | | | | ACCACTGCTGCCCCATCTTCCACCGTT | |
| | | | | | | GAAACTGTTTCTCCATCCAGCACCGAA | |
| | | | | | | ACTATCTCTCAACAAACTGAAAAT | |
| 15 | YCR028c | FEN2 | 3.64 | MHKESKSITQHEVERESVSSKRAIKK | 42 | ATGATGAAGGAATCGAAATCTATCACT | 41 |
| | | | | RLLLRKIDLFVLSFVCLQYWINYVDR | | CAACATGAGGTTGAGAGAGAATCTGTT | |
| | | | | VGFTNAYISQHKEDLKNVGNDLT | | TCTTCCAAGCGTGCCATTAAAAAGAGA | |
| | | | | | | TTACTTCTGTTTAAAATAGACTTGTTT | |
| | | | | | | GTGCTATCATTTGTTTGCTTGCAATAC | |
| | | | | | | TGGATTAATTATGTCGACCGTGTCGGT | |
| | | | | | | TTCACCAATGCATATATATCCGGTATG | |
| | | | | | | AAGGAAGATCTTAAGATGGTCGGGAAA | |
| | | | | | | CGATTTGACC | |
| 16 | YGL126w | SCS3 | 3.54 | LISSSKWFNAIHLLVCPLTVLGYLMN | 6 | ATGTCTAGCAAATGGTTTAATGCTATA | 5 |
| | | | | AYGYGAALQATLNKDGLVNAHLVKKG | | CACCTACTGGTGTGCCCGTTGACGGTA | |
| | | | | | | CTGGTAGGATATCTCATGAACGCGTAT | |
| | | | | | | GGCTACGGTGCGGGCGCTGCAAGCAAC | |
| | | | | | | CCTGAATAAGGATGGTCTGGTAAATGC | |
| | | | | | | TATGTTGGTAAAGAAAGGG | |
| 17 | YMR200w | ROT1 | 3.46 | NWSKKFTLAKKLILGGYLFAQKVYCE | 44 | ATGTGGTCGAAAAAGTTTACATTAAAA | 43 |
| | | | | DESNSIYGTWSSKASNQVFTGPGFDP | | AAGCTAATCTTAGGCGGGTATTTGTTT | |
| | | | | VDELLIEPSLPGLSYSFTEDGHYEEA | | GCTCAAAAGGTCTATTGTGAAGACGAA | |
| | | | | TYQVSGNPRNPTCPMASLIYQHG | | AGTAACTCTATATACGGTACCTGGTCA | |
| | | | | | | TCTAAATCAAATCAAGTGTTCACGGGA | |
| | | | | | | CCGGGGTTTTATGATCCCGTAGATGAA | |
| | | | | | | CTATTGATAGAACCTTCATTGCCCGGG | |
| | | | | | | CTTAGCTATTCGTTCACTGAAGATGGT | |
| | | | | | | TGGTACGAAGAAGCTACTTACCAGGTA | |
| | | | | | | AGTGGCAATCCTCGTAACCCAACTTGC | |
| | | | | | | CCCATGGCTTCGTTGATTTATCAGCAT | |
| | | | | | | GGT | |
| 18 | YDR304c | CPR5 | 3.44 | MKLQFFSFITLFACLFTTAIFAKEDT | 46 | ATGAAGCTTCAATTTTTTCCTTTATTA | 45 |
| | | | | AEDPETITHKVYFDINHGDKQIGRI | | CCTTATTTGCTTGTCTCTTCACAACAG | |
| | | | | | | CCATTTTTGCGAAAGAGGACACGGCAG | |
| | | | | | | AAGATCCTGAGATCACACACAAGGTCT | |
| | | | | | | ACTTTGACATTAATCACGGTGATAAAC | |
| | | | | | | AAATTGGTAGAATT | |
| 19 | YLR110c | CCW12 | 3.33 | NQFSTVASIAAVAAVASAAANVTTAT | 48 | ATGCAATTTTCTACTGTCGCTTCTATC | 47 |
| | | | | VSQESTTLVTITSCEDHVCSETVSPA | | GCCGCTGTCGCCGCTGTCGCTTCTGCC | |
| | | | | LVSTATVTVDDVITQYTTWCPLTTEA | | GCTGCTAACGTTACCACTGCTACTGTC | |
| | | | | PKNGTSTAAPVSTSTEPKNITS | | AGCCAAGAATCTACCACTTTGGTCACC | |
| | | | | | | ATCACTTCTTGTGAAGACCACGTCTGT | |
| | | | | | | TCTGAAACTGTCTCCCCAGCTTTGGTT | |
| | | | | | | TCCACCGCTACCGTCACCGTCGATGAC | |
| | | | | | | GTTATCACTCAATACACCACCTGGTGC | |
| | | | | | | CCATTGACCACTGAAGCCCCAAAGAAC | |
| | | | | | | GGTACTTCTACTGCTGCTCCAGTTACC | |
| | | | | | | TCTACTGAAGCTCCAAAGAACACCACC | |
| | | | | | | TCT | |
| 20 | YDR518w | EUG1 | 3.21 | MQVTTRFISAIVSFCLFASFTLAENS | 50 | ATGCAAGTGACCACAAGATTTTATATC | 49 |
| | | | | ARATPGSDLLVLTEKKFKSFIESH | | TGCGATAGTCTCGTTTTGCCTGTTTGC | |
| | | | | | | TTCTTTCACGTTGGCTGAAAACAGCGC | |
| | | | | | | AAGAGCTACGCCGGGATCAGATTTACT | |
| | | | | | | CGTTCTAACAGAGAAGAAATTTAAATC | |
| | | | | | | ATTCATCGAATCTCAT | |
| 21 | YEL040w | UTR2 | 3.16 | NAIVNSNLICLVSIFSFVVRVEAATF | 52 | ATGGCAATCGTTAATAGTTGGCTAATT | 51 |
| | | | | CNATQACPEDKPCCSQYGECGTGQYC | | TGTTTAGTCAGTATTTTTTCCTTCGTG | |
| | | | | LNNCDVRYSFSHDSC | | GTACGTGTAGAGGCCGCTACATTTTGC | |
| | | | | | | AATGCAACTCAAGCATGTCCCGAAGAT | |
| | | | | | | AAACCATGTTGCTCACAATATGGTGAA | |
| | | | | | | TGTGGTACTGGTCAATATTGTCTGAAC | |
| | | | | | | AACTGTGATGTAAGATATTCGTTTAGT | |
| | | | | | | CATGATTCATGT | |
| 22 | YLR332w | MID2 | 3.00 | MLSFTTKNSFRLLLLILSCISTIRAQ | 54 | ATGTTGTCTTTCACAACCAAGAATAGT | 53 |
| | | | | FFVQSSSSNSSAVSTARSSVSRVSSS | | TTCCGCTTATTACTTTTAATACTGTCA | |
| | | | | SSILSSSHVSSSSADSSSLTSSTSSR | | TGCATATCGACGATACGCGCACAATTT | |
| | | | | SLVSHTSSSTSIASISFTSFSF | | TTCGTGCAATCATCATCTTCGAATTCT | |
| | | | | | | TCAGCAGTATCTACTGCACGTTCTTCC | |
| | | | | | | GTAAGTAGAGTTAGTTCTTCAAGTTCC | |
| | | | | | | ATTTTGTCATCCAGTATGGTTTCTTCC | |
| | | | | | | TCAAGTGCTGACTCATCTTCCCTTACT | |
| | | | | | | TCATCGACATCAAGTAGGTCCCTCGTG | |
| | | | | | | TCACATACGAGTTCGTCTACCAGCATT | |
| | | | | | | GCCTCCATATCGTTCACATCATTCAGT | |
| | | | | | | TTC | |
| 23 | YDR056c | | 2.97 | MLVRLLRVILLASMVFCADILQLSYS | 56 | ATGCTTGTGCGGCTGTTGCGTGTGATT | 55 |
| | | | | DDAKDAIPLGTFEIDSTSDGNVTVTT | | TTATTGGCCAGCATGGTTTTCTGTGCT | |
| | | | | VNIQDVEVSGEYCLNAQIE | | GATATTTTACAATTAAGCTATTCAGAT | |
| | | | | | | GATGCGAAAGACGCTATACCCCTAGGA | |
| | | | | | | ACATTTGAGATTGATAGTACATCCGAT | |
| | | | | | | GGGAATGTTACAGTAACAACCGTTAAT | |
| | | | | | | ATACAGGATGTTGAAGTTTCTGGAGAA | |
| | | | | | | TACTGTTTGAATGCCCAGATTGAA | |
| 24 | YJL193w | | 2.83 | NKQQLSASIRHNAHIIFLCISWYFIS | 58 | ATGTTTCAACAGCTGTCGGCATCCATT | 57 |
| | | | | SLASQVTKQVLTVCPLPL | | AGGCACAATGCACACATAATTTTTTTA | |
| | | | | | | TGCATAAGTTGGTATTTTATTTCATCG | |
| | | | | | | TTGGCATCTCAGGTAACGAAGCAGGTA | |
| | | | | | | CTAACGGTTTGCCCATTACCACTT | |
| 25 | YHR139c | SPS100 | 2.76 | MKFTSVLAFFLATLTASATPLYKRQN | 8 | ATGAAATTCACATCAGTGCTAGCATTT | 7 |
| | | | | VTSGGGTVPIITGGPAVSGSQSNVTT | | TTTCTTGCAACTTTAACAGCTTCTGCA | |
| | | | | TTLFNSTSTLNITQLYQIATQVNQTL | | ACACCACTTTACAAGAGGCAGAACGTT | |
| | | | | QSESSS | | ACTTCTGGCGGCGGTACGGTCCCCGTG | |
| | | | | | | ATCATCACGGGTGGACCTGCTGTATCT | |
| | | | | | | GGTAGCCAGTCAAACGTTACTACCACA | |
| | | | | | | ACGCTATTCAACTCTACTTCCACCTTA | |
| | | | | | | AACATCACTCAACTTTACCAAATTGCT | |
| | | | | | | ACTCAAGTTAATCAGACTTTACAAAGC | |
| | | | | | | GAATCGTCTTCC | |
| 26 | YGR014w | MSB2 | 2.69 | NQFPFACLLSTLVISGSLARASPFDF | 10 | ATGCAGTTTCCATTCGCTTGTCTCCTA | 9 |
| | | | | IFGNGTQQAQSQSESQQQVSFTNEAS | | TCGACCCTTGTAATTAGTGGGTCATTG | |
| | | | | QDSSTTSLVTAYSQGVHSHQSATIVS | | GCCCGGGCCAGCCCCTTCGACTTTATA | |
| | | | | ATISSLPSTWYDASSTSQTSVS | | TTCGGCAATGGAACGCAACAAGCTCAG | |
| | | | | | | AGCCAAAGCGAGAGTCAAGGTCAAGTT | |
| | | | | | | TCTTTCACCAATGAAGCTTCTCAGGAT | |
| | | | | | | AGTT | |
| 27 | YPL234c | TFP3 | 2.59 | MSTQLASNIYAPLYAPFFGFAGCAAA | 60 | ATGTCAACGCAACTCGCAAGTAACATA | 59 |
| | | | | MVLSCLGAAIGTAKSGIGIAGIGTFK | | TATGCTCCATTGTACGCTCCCTTTTTC | |
| | | | | PELIKKSLIP | | GGGTTCGCAGGTTGTGCAGCTGCCATG | |
| | | | | | | GTGCTTTCCTGTTTGGGAGCTGCCATT | |
| | | | | | | GGTACAGCTAAGTCAGGTATTGGTATC | |
| | | | | | | GCCGGTATAGGTACTTTCAAGCCGGAA | |
| | | | | | | TTGATCATGAAGTCTTTGATTCCT | |
| 28 | YDR057w | YOS9 | 2.56 | HQAKIIYALSAISALIPLGSSLLAPI | 62 | ATGCAAGCTAAAATTATATATGCTCTG | 61 |
| | | | | EDPIVSNKYISYIDEDDWSDRILQNQ | | AGCGCAATTTCTGCGTTGATTCCGTTA | |
| | | | | SVMNSGY | | GGATCATCACTATTAGCACCTATAGAA | |
| | | | | | | GACCCCATAGTATCGAATAAGTACCTC | |
| | | | | | | ATATCTTACATCGATGAGGACGACTGG | |
| | | | | | | AGTGATAGGATATTACAAAATCAGTCT | |
| | | | | | | GTCATGAACTCGGGATAT | |
| 29 | YDR055w | PST1 | 2.54 | MQLHSLIASTALLITSALAATSSSSS | 64 | ATGCAATTACATTCACTTATCGCTTCA | 63 |
| | | | | IPSSCTISSHATATAQSDLDKVSRCD | | ACTGCGCTCTTAATAACGTCAGCTTTG | |
| | | | | T | | GCTGCTACTTCCTCTTCTTCCAGCATA | |
| | | | | | | CCCTCTTCCTGTACCATAAGCTCACAT | |
| | | | | | | GCCACGGCCACAGCTCAGAGTGACTTA | |
| | | | | | | GATAAATATAGCCGCTGTGATACG | |
| 30 | YHR110w | ERP5 | 2.50 | MKYNIVHGICLLFAITQAVGAVHFYA | 66 | ATGAAATATAATATAGTGCATGGAATT | 65 |
| | | | | KSGETKCFYEHLSRGNLLIGDLDLYV | | TGCCTATTATTTGCTATTACCCAAGCT | |
| | | | | EKDGLFEEDPESSLTITVDETFDNDH | | GTAGGGGCTGTCCATTTTTATGCGAAG | |
| | | | | RVLNQKNSHTGDVTFTALDTGE | | TCCGGGGAAACCAAATGCTTCTATGAA | |
| | | | | | | CACTTATFCCCGGGGAAACCTACTGAT | |
| | | | | | | TGGGGATTTAGACCTATATGTAGAAAA | |
| | | | | | | GGATGGTCTGTTTGAAGAGGACCCTGA | |
| | | | | | | ATCCAGTCTGACAATAACTGTCGATGA | |
| | | | | | | AACATTCGATAACGACCATCGTGTCCT | |
| | | | | | | AAATCAAAAAAACTCACACACAGGTGA | |
| | | | | | | TGTTACTTTTACAGCTTTAGACACAGG | |
| | | | | | | TGAA | |
| 31 | YOL011w | PLB3 | 2.48 | MIRPLCSKIIISYIFAISQFLLAANA | 68 | ATGATACGTCCATTATGTTCAAAAATT | 67 |
| | | | | WSPTDSYVPGTVSCPDDINLVREATS | | ATTATCAGTTACATATTCGCAATTTCT | |
| | | | | ISQNESAWLEKRNKVTSVALKDFLTR | | CAGTTTCTACTGGCCGCTAATGCGTGG | |
| | | | | ATANFSDSSEVLSKLFNDGNSE | | TCGCCCACAGATAGTTATGTTCCTGGC | |
| | | | | | | ACCGTGTCGTGTCCCGATGACATAAAT | |
| | | | | | | CTGGTAAGAGAGGCTACGTCTATATCT | |
| | | | | | | CAGAATGAGAGCGCATGGTTGGAAAAG | |
| | | | | | | AGGAATAAAGTCACTAGTGTAGCTTTA | |
| | | | | | | AAAGATTTCTTGACTAGGGCTACTGCA | |
| | | | | | | AATTTTTCAGATAGCTCAGAAGTTTTG | |
| | | | | | | TCGAAGCTATTTAATGATGGCAACAGC | |
| | | | | | | GAA | |
| 32 | YDR134c | | 2.47 | MQFSTVASIAAIAAVASAASNITTAT | 70 | ATGCAATTCTCTACCGTCGCTTCTATC | 69 |
| | | | | VTEESTTLVTITSCEDHVCSETVS | | GCTGCTATTGCCGCTGTTGCCTCCGCC | |
| | | | | | | GCTTCTAACATTACCACTGCTACTGTC | |
| | | | | | | ACAGAAGAATCTACCACTTTGGTCACT | |
| | | | | | | ATCACTTCTTGTGAGGACCACGTTTGT | |
| | | | | | | TCTGAAACAGTTTCC | |
| 33 | YBR296c | PHO89 | 2.42 | BALHQFDYIFAIAHLAFAFLDAFNIG | 72 | ATGGCTTTACATCAATTTGACTATATT | 71 |
| | | | | ANDVANSFASSISSRS | | TTTGCCATTGCCATGTTATTTGCATTT | |
| | | | | | | TTGGATGCCTTTAACATCGGGGCAAAC | |
| | | | | | | GACGTGGCGAACTCATTCGCGTCGTCG | |
| | | | | | | ATCTCTTCTAGATCT | |
| 34 | YDR144c | MKC7 | 2.37 | HKLSVLTFVVDALLVCSSIVDAGVTD | 74 | ATGAAATTATCTGTCCTCACATTTGTC | 73 |
| | | | | FPSLPSNEVYVKNNFQKKYGSSFENA | | GTAGATGCATTACTTGTCTGCAGCTCA | |
| | | | | LDDTKGRTRLHTRDDYELVELTNQNS | | ATAGTAGATGCCGGTGTTACAGATTTT | |
| | | | | FYS | | CCATCCTTACCAAGTAATGAAGTCTAT | |
| | | | | | | GTCAAAATGAATTTTCAGAAGAAATAC | |
| | | | | | | GGCAGTTCATTTGAAAACGCTTTGGAT | |
| | | | | | | GATACAAAAGGTAGAACGCGTTTGATG | |
| | | | | | | ACAAGAGATGATGATTACGAGCTGGTG | |
| | | | | | | GAACTGACTAATCAAAAACAGTTTTTA | |
| | | | | | | TTCG | |
| 35 | YDR077w | SED1 | 2.37 | HKLSTVLLSAGLASTTLAQFSNSTSA | 76 | ATGAAATTATCAACTGTCCTATTATCT | 75 |
| | | | | SSTDVTSSSSISTSSGSVITSSEAPE | | GCCGGTTTAGCCTCGACTACTTTGGCC | |
| | | | | SDNGTSTAAPTETSTE | | CAATTTTCCAACAGTACATCTGCTTCT | |
| | | | | | | TCCACCGATGTCACTTCCTCCTCTTCC | |
| | | | | | | ATCTCCACTTCCTCTGGCTCAGTAACT | |
| | | | | | | ATCACATCTTCTGAAGCTCCAGAATCC | |
| | | | | | | GACAACGGTACCAGCACAGCTGCACCA | |
| | | | | | | ACTGAAACCTCAACAGAG | |
| 36 | YDR276c | PMP3 | 2.35 | MDSAKIINIILSLFLPPVAVFLARGN | 78 | ATGGATTCTGCCAAGATCATTAACATT | 77 |
| | | | | GTDCIVDI | | ATATTATCCCTTTTCTTACCACCAGTC | |
| | | | | | | GCCGTTTTTCTAGCCCGTGGGTGGGGT | |
| | | | | | | ACTGACTGTATAGTGGATATC | |
| 37 | YNL291c | MID1 | 2.35 | MIVWQALFVVYCLFTTSIHGLFQDFM | 80 | ATGATAGTGTGGCAAGCACTATTCGTG | 79 |
| | | | | PFANKNISLKFPSLNRWEKNVMATGQ | | GTTTACTGCCTATTTACCACTTCTATT | |
| | | | | QTIINSDSIYE | | CACGGTTTATTCCAAGACTTCAATCCT | |
| | | | | | | TTCGCAAATAAGAATATTTCCTTAAAG | |
| | | | | | | TTTCCCAGCCTAAATAGATGGGAGAAA | |
| | | | | | | AACGTTATGGCTACTGGTCAACAAACA | |
| | | | | | | ATCATCAATTCGGATAGCATTTATGAA | |
| 38 | YAL058w | CNE1 | 2.32 | MKFSAYLWWLFLNLALVKGTSLLSNV | 82 | ATGAAATTTTCTGCGTATTTATGGTGG | 81 |
| | | | | LAEDSFWEHFQAYTNTKHLNQEWITS | | CTGTTTTTGAATCTAGCGTTGGTGAAA | |
| | | | | EAVNNEGSKIYGACWRLSQGRLQGSA | | GGCACTTCATTGCTATCCAACGTTACA | |
| | | | | WDKGIAVRTGNAAAMIGHLLE | | TTAGCGGAAGATTCTTTCTGGGAGCAT | |
| | | | | | | TTTCAGGCTTACACTAATACAAAGCAT | |
| | | | | | | TTAAACCAAGAGTGGATCACAAGTGAA | |
| | | | | | | GCCGTCAACAATGAAGGCTCTAAAATA | |
| | | | | | | TATGGTGCACAATGGCGACTATCACAG | |
| | | | | | | GGTCGATTGCAAGGATCCGCATGGGAT | |
| | | | | | | AAAGGAATCGCAGTTCGAACAGGCAAT | |
| | | | | | | GCCGCAGCTATGATAGGACATCTCTTG | |
| | | | | | | GAG | |
| 39 | YLR300w | EXG1 | 2.31 | MLSLKTLLCTLLTVSSVLATPVPARD | 84 | ATGCTTTCGCTTAAAACGTTACTGTGT | 83 |
| | | | | PSSIQFVHEENKKRYYDYDHGSLGE | | ACGTTGTTGACTGTGTCATCAGTACTC | |
| | | | | | | GCTACCCCAGTCCCTGCAAGAGACCCT | |
| | | | | | | TCTTCCATTCAATTTGTTCATGAGGAG | |
| | | | | | | AACAAGAAAAGATACTACGATTATGAC | |
| | | | | | | CACGGTTCCCTCGGAGAA | |
| 40 | YIL140w | AXL2 | 2.30 | MTQLQISLLLTATISLLHLVVATPYE | 86 | ATGACACAGCTTCAGATTTCATTATTG | 85 |
| | | | | AYPIGKQYPPVARVNESFTFQISNDT | | CTGACAGCTACTATATCACTACTCCAT | |
| | | | | YKSSVDXTAQITYNCFDLPSWLSFDS | | CTAGTAGTGGCCACGCCCTATGAGGCA | |
| | | | | SSRTFSGEPSSDLLSDANTTLY | | TATCCTATCGGAAAACAATACCCCCCA | |
| | | | | | | GTGGCAAGAGTCAATGAATCGTTTACA | |
| | | | | | | TTTCAAATTTCCAATGATACCTATAAA | |
| | | | | | | TCGTCTGTAGACAAGACAGCTCAAATA | |
| | | | | | | ACATACAATTGCTTCGACTTACCGAGC | |
| | | | | | | TGGCTTTCGTTTGACTCTAGTTCTAGA | |
| | | | | | | ACGTTCTCAGGTGAACCTTCTTCTGAC | |
| | | | | | | TTACTATCTGATGCGAACACCACGTTG | |
| | | | | | | TAT | |
| 41 | YBR187w | | 2.26 | MGNHIKKASLIALLPLFTAAAAAATD | 4 | ATGGGAAATATGATAAAGAAGGCATCT | 3 |
| | | | | AETSMESGSSSHLKS | | TTAATAGCCCTCCTACCGCTGTTCACC | |
| | | | | | | GCCGCAGCCGCTGCAGCTACTGATGCG | |
| | | | | | | GAGACATCTATGGAATCTGGGAGTTCT | |
| | | | | | | TCACATTTGAAGTCT | |
| 42 | YBR070c | SAT2 | 2.19 | MKTAYLASLVLIVSTAYVIRLIAILP | 88 | ATGAAAACGGCCTACTTGGCGTCATTG | 87 |
| | | | | FFHTQAGTEKDTKDGVNLLKIRKSSK | | GTGCTCATCGTACGACAGCATATGTTA | |
| | | | | K | | TTAGGTTGATAGCGATTCTGCCTTTTT | |
| | | | | | | TCCACACTCAAGCAGGTACAGAAAAGG | |
| | | | | | | ATACGAAAGATGGAGTTAACCTACTGA | |
| | | | | | | AAATACGAAAATCGTCAAAGAAA | |
| 43 | YJR118c | ILM1 | 2.16 | MAQALNSTNIAFFRVAFLFTIAFFCL | 90 | ATGGCTCAAGCCTTGAACTCCACCAAT | 89 |
| | | | | KNVNSILQNTYFIVLTQAMNLPQLTL | | ATTGCTTTTTTCAGAGTAGCATTTTTA | |
| | | | | SR | | TTCACGATCGCCTTCTTTTGTTTAAAG | |
| | | | | | | AACGTTAATTCTATTTTGCAAAATACA | |
| | | | | | | TATTTCATAGTCTTAACGCAAGCGATG | |
| | | | | | | AATTTACCGCAGTTAACACTGTCACGT | |
| 44 | YOR190w | SPR1 | 2.14 | MVSFRGLTTLTLLFTKLVNCNPVSTK | 92 | ATGGTTTCGTTCAGAGGGCTGACTACA | 91 |
| | | | | NRDSIQFIYKEKDSIYSAINNQAINE | | CTAACACTACTTTTTACCAAATTAGTA | |
| | | | | K | | AACTGTAATCCTGTTTCCACAAAAAAT | |
| | | | | | | AGGGACTCTATACAGTTTATTTATAAA | |
| | | | | | | GAAAAGGATAGTATATACTCTGCCATC | |
| | | | | | | AACAATCAAGCCATCAATGAAAAA | |
| 45 | YDR519w | FPR2 | 2.13 | MHFNIYLFVTFFSTILAGSLSDLEGI | 94 | ATGATGTTTAATATTTACCTTTTCGTC | 93 |
| | | | | IKRIPVEDCLIKANPGDKVKVHYTGS | | ACTTTTTTTTCCACCATTCTTGCAGGT | |
| | | | | LLESGTVFDSSYSR | | TCCCTGTCAGATTTGGAAATCGGTATT | |
| | | | | | | ATCAAGAGAATACCGGTAGAAGATTGC | |
| | | | | | | TTAATTAAGGCAATGCCAGGTGATAAA | |
| | | | | | | GTTAAGGTTCATTATACAGGATCTTTA | |
| | | | | | | TTAGAATCGGGAACTGTATTTGACTCA | |
| | | | | | | AGTTATTCAAGA | |
| 46 | YIL090w | | 2.13 | MTSLSKSFMQSGRICAACFYLLFTLL | 96 | ATGACCAGTTTGTCCAAAAGCTTCATG | 95 |
| | | | | SIPISFKVGGLECG | | CAGAGTGGACGAATCTGCGCAGCATGT | |
| | | | | | | TTCTATCTGTTATTCACACTACTTTCA | |
| | | | | | | ATTCCAATCTCGTTTAAAGTTGGTGGT | |
| | | | | | | TTGGAATGCGGG | |
| 47 | YER113c | | 2.06 | MRVRPKRSVITLMAIVVVKLILRNQF | 98 | ATGAGAGTAAGACCAAAGAGGTCGGTC | 97 |
| | | | | YSSRTRGHGQPEVISSSQKNLYDGWI | | ATAACACTCATGGCGATAGTAGTCGTG | |
| | | | | TPNFYRKQDPLELIVNKVESDLTQLP | | ATGCTCATCCTCAGAAACCAGTTCTAC | |
| | | | | YAYYDLPFTCPPTHHKKPLHLS | | TCATCACGAACGCGAGGGCATGGGCAG | |
| | | | | | | GAACCAGTCATCTCCTCCAGCCAAAAG | |
| | | | | | | AATCTTTATGACGGGTGGATAACACCC | |
| | | | | | | AATTTCTATAGAAAGGGTGATCCCTTG | |
| | | | | | | GAATTGATTGTGAATAAGGTAGAATCT | |
| | | | | | | GACTTAACGCAATTGCCATACGCATAT | |
| | | | | | | TATGACTTGCCCTTCACTTGTCCTCCT | |
| | | | | | | ACTATGCATAAAAAACGGCTTCATTTA | |
| | | | | | | TCT | |
| 48 | YDR261c | EXG2 | 2.05 | MPLKSFFFSAFLVLCLSKFTQGVGTT | 100 | ATGCCTTTGAAGTCGTTTTTTTTTTCA | 99 |
| | | | | EKEESLSPLENILQNKFASYYANDTI | | GCATTTCTAGTTTTATGCCTGTCTAAA | |
| | | | | TVKGITIGGWLVTEPYITPSLYRNAT | | TTCACGCAAGGCGTTGGCACCACAGAG | |
| | | | | SLAKQQNSSSNISIVDEFTLC | | AAGGAAGAATCGTTATCGCCTTTGGAA | |
| | | | | | | CTAAATATTTTACAAAACAAATTCGCC | |
| | | | | | | TCCTACTATGCAAACGACACTATCACC | |
| | | | | | | GTGAAAGGTATTACTATTGGCGGCTGG | |
| | | | | | | CTAGTAACAGAACCTTATATCACGCCA | |
| | | | | | | TCATTATATCGTAATGCTACGTCACTG | |
| | | | | | | GCAAAACAGCAAAACTCTTCCAGCAAT | |
| | | | | | | ATCTCCATTGTCGACGAATTTACTCTT | |
| | | | | | | TGT | |
| 49 | YDR420w | HKR1 | 2.04 | MVSLKIKKILLLVSLLNAIEAYSNDT | 2 | ATGGTCTCATTGAAAATAAAAAAAATT | 1 |
| | | | | IYSTSYNNGIESTPSYSTSAISSTGS | | TTACTCCTGGTGTCATTGTTAAATGCA | |
| | | | | SNKENAITSSSETTTMAGQYGESGST | | ATCGAGGCCTATAGTAACGTACAATAT | |
| | | | | TIMDEQETGTSSQYISVTTTTQ | | ATTCAACTTCATACAATAATGGAATAG | |
| | | | | | | AAAGCACACCCTCATATTCAACATCCG | |
| | | | | | | CGATATCCAGTACCGGATCTAGCAACA | |
| | | | | | | AAGAGAATGCAATAACATCAAGCTCTG | |
| | | | | | | AAACCACCACAATGGCTGGCCAATATG | |
| | | | | | | GTGAAAGTGGAAGCACAACAATAATGG | |
| | | | | | | ATGAACAAGAAACTGGTACGTCCAGCC | |
| | | | | | | AGTATATTAGTGTGACGACGACAACGC | |
| | | | | | | AA | |
| 50 | YFL051c | | 2.03 | MSIPHSVFSALLFVALATTTLASTEA | 102 | ATGTCTATACCCCATTCCGTATTTTCG | 101 |
| | | | | CLPTNKREDGNNINFYEYTIGDQTTY | | GCACTCTTGGTCTTCGTGGCGCTAGCT | |
| | | | | LEPEYQGYEYSNTKK | | ACTACAACCTTAGCCAGTACAGAAGCT | |
| | | | | | | TGCTTACCAACAAACAAAAGGGAAGAT | |
| | | | | | | GGTATGAATATTAATTTTTATGAGTAC | |
| | | | | | | ACAATAGGCGACCAAACCACATACTTG | |
| | | | | | | GAGCCTGAATATATGGGCTATGAATAC | |
| | | | | | | TCCAATACAAAGAAG | |
| 51 | YNL300w | TOS6 | 2.02 | MKFSTLSTVAAIAAFASADSTSDGVT | 14 | ATGAAATTCTCTACTCTCTCCACCGTT | 13 |
| | | | | YVDVTTTPQSTTSMVSTVKTTSTPYT | | GCTGCCATTGCCGCATTTGCTTCCGCA | |
| | | | | TSTIATLSTKSISSQANTTTHEIST | | GATTCCACCTCTGATGGTGTCACTTAC | |
| | | | | | | GTAGATGTTACCACCACCCCACAAAGT | |
| | | | | | | ACTACATCTATGGTCTCCACCGTGAAA | |
| | | | | | | ACTACTTCCACTCCATACACTACAAGT | |
| | | | | | | ACCATTGCCACTCTATCCACTAAATCT | |
| | | | | | | ATCAGTAGCCAAGCTAACACCACCACC | |
| | | | | | | CATGAGATCAGCACA | |

[0056] Table 2 shows the systematic and common names of genes from which the gene regions encoding secretory signal peptides are derived, relative secretion efficiency in relation to α-factor-derived secretory signal peptides, the amino acid sequences of the secretory signal peptides, and the nucleotide sequences of the gene regions encoding secretory signal peptides, concerning secretory signal peptides having secretion ability that is more than twice that of α-factor-derived secretory signal peptide at low temperature (15° C.). SEQ ID NOs: of the amino acid sequences and the nucleotide sequences are indicated in the rightmost column. The systematic and common names of genes (or gene regions encoding secretory signal peptides) identical to genes (or gene regions encoding secretory signal peptides) shown in Table 1 are shaded.

[0057] Hereafter, a secretory signal peptide (or a gene region encoding a secretory signal peptide) shown in Table 1 is referred to as a “secretory signal peptide at moderate temperature (or a gene region encoding a secretory signal peptide at moderate temperature),” and a secretory signal peptide (or a gene region encoding a secretory signal peptide) shown in Table 2 is referred to as a “secretory signal peptide at low temperature (or a gene region encoding a secretory signal peptide at low temperature).” Also, a “secretory signal peptide at moderate temperature (or a gene region encoding a secretory signal peptide at moderate temperature)” and a secretory signal peptide at low temperature (or a gene region encoding a secretory signal peptide at low temperature) are collectively referred to as “secretory signal peptides (or gene regions encoding secretory signal peptides).”

[0058] DNA according to the present invention encodes a secretory signal peptide consisting of the amino acid sequence of a secretory signal peptide shown in Table 1 or 2. DNA according to the present invention can be easily obtained by preparing a primer based on the amino acid sequence of a secretory signal peptide shown in Table 1 or 2 and conducting PCR using the genomic DNA extracted from Saccharomyces cerevisiae as a template.

[0059] DNA according to the present invention may be DNA encoding a secretory signal peptide consisting of an amino acid sequence derived from the amino acid sequence of a secretory signal peptide shown in Table 1 or 2 by deletion, substitution, or addition of one or several amino acids (e.g., 1 to 10 or 1 to 5 amino acids), and having secretory signal activity at 30° C. regarding the amino acid sequence derived from the amino acid sequence of the secretory signal peptide at moderate temperature shown in Table 1, or having secretory signal activity at 15° C. regarding the amino acid sequence derived from the amino acid sequence of the secretory signal peptide at low temperature shown in Table 2.

[0060] The term “secretory signal activity” used herein refers to the ability for extracellular protein secretion of secretory signal peptides expressed as fusion proteins with proteins, such as membrane proteins and secretory proteins, or the ability for transporting proteins to intracellular organelles, including cell walls, cell membranes, endoplasmic reticulums, and Golgi bodies. Secretory signal activity of the secretory signal peptide encoded by DNA according to the present invention can be evaluated by, for example, utilizing a reporter gene, such as the luciferase gene. For example, an expression vector, wherein a reporter gene is ligated, as a fusion protein, to a site downstream of DNA according to the present invention, is constructed. Subsequently, an adequate host (e.g., yeast) is transformed using the resulting expression vector. The resulting transformant is cultured at 30° C. or 15° C., the amount of the reporter protein secreted extracellularly or the amount thereof transported to intracellular organelles, including cell walls, cell membranes, endoplasmic reticulums, and Golgi bodies, is quantified to result in the activity level of the reporter protein or to result in the protein level via an immunological method (e.g., Western blotting, ELISA, or flow cytometry). Thus, secretory signal activity of the secretory signal peptide encoded by DNA according to the present invention can be evaluated. Alternatively, the ability for transportation to the intracellular organelles as secretory signal activity can be evaluated by inspecting the localization of the fusion protein encoded by a foreign gene ligated downstream of DNA according to the present invention in intracellular organelles via immunostaining using an antibody or other means.

[0061] Further, DNA according to the present invention may be DNA consisting of a nucleotide sequence of a gene region encoding a secretory signal peptide shown in Table 1 or 2, or DNA cosisting of a nucleotide sequence derived from the nucleotide sequence of a gene region encoding a secretory signal peptide shown in Table 1 or 2 by deletion, substitution, or addition of 1 or several (e.g., 1 to 10 or 1 to 5) nucleotides and encoding a secretory signal peptide having secretory signal activity at 30° C. regarding the nucleotide sequence derived from the nucleotide sequence of the gene region encoding a secretory signal peptide at moderate temperature shown in Table 1, or encoding a secretory signal peptide having secretory signal activity at 15° C. regarding the nucleotide sequence derived from the nucleotide sequence of the gene region encoding a secretory signal peptide at low temperature shown in Table 2. Accordingly, DNA according to the present invention may be the full-length DNA consisting of the nucleotide sequence of the gene region encoding a secretory signal peptide shown in Table 1 or 2. As long as the amino acid sequence encoded by DNA according to the present invention exhibits secretion signal activity at 30° C., such DNA may be part of the DNA consisting of the nucleotide sequence of the gene region encoding a secretory signal peptide at moderate temperature shown in Table 1. Alternatively, such DNA may be part of the DNA consisting of the nucleotide sequence of the gene region encoding a secretory signal peptide at low temperature shown in Table 2, provided that the amino acid sequence encoded by such DNA exhibits secretory signal activity at 15° C.

[0062] DNA according to the present invention includes a DNA that hybridizes under stringent conditions with DNA consisting of a nucleotide sequence complementary to DNA consisting of a nucleotide sequence of a gene region encoding a secretory signal peptide shown in Table 1 or 2 and that encodes a secretory signal peptide exhibiting secretory signal activity at 30° C. regarding a gene region encoding a secretory signal peptide at moderate temperature shown in Table 1 or at 15° C. regarding a gene region encoding a secretory signal peptide at low temperature shown in Table 2.

[0063] Under stringent conditions, for example, hybridization with phosphorus-32-labeled probe DNA is carried out in a hybridization solution comprising 5×SSC (0.75 M NaCl, 0.75 M sodium citrate), 5× Denhart's reagent (0.1% ficoll, 0.1% polyvinylpyrrolidone, 0.1% bovine serum albumin), and 0.1% sodium dodecyl sulfate (SDS) at 45° C. to 65° C., and preferably at 55° C. to 65° C. The step of washing is carried out in a washing solution comprising 2×SSC and 0.1% SDS at 45° C. to 55° C., and preferably in a washing solution comprising 0.1×SSC and 0.1% SDS at 45° C. to 55° C. When probe DNA labeled with an enzyme using the AlkPhos direct labeling module kit (Amersham Bioscience) is used, hybridization is carried out in a hybridization solution (containing 0.5 M NaCl and a 4% blocking reagent) having the composition described in the manufacturer's instructions of the kit at 55° C. to 75° C. The step of washing is carried out in a primary washing solution (containing 2M urea) described in the manufacturer's instructions of the kit at 55° C. to 75° C. and in a secondary washing solution at room temperature. Another detection method may be employed. In such a case, such detection method may be carried out under its standard conditions.

[0064] Once the nucleotide sequence of DNA according to the present invention has been determined, DNA of the present invention can be obtained by chemical synthesis, by PCR using the cloned probe as a template, or by hybridization using a DNA fragment having the aforementioned nucleotide sequence as a probe. Further, DNA that is a mutant of the DNA of the present invention and has functions equivalent to those before mutation can be synthesized via, for example, site-directed mutagenesis.

[0065] Mutation can be introduced into DNA of the present invention by conventional techniques, such as the Kunkel method, the Gapped duplex method, or a method in accordance therewith. For example, a mutagenesis kit (e.g., Mutant-K that utilizes site-directed mutagenesis, TaKaRa) or the LA PCR in vitro Mutagenesis Series kit (TaKaRa) may be used to introduce mutation. Other mutagenesis techniques may also be employed.

[0066] The secretory signal peptide of the present invention is encoded by DNA of the present invention. The secretory signal peptide of the present invention can be obtained as a fusion protein with a protein to be expressed (e.g., a membrane or secretory protein).

[0067] An expression vector comprising DNA of the present invention and a foreign gene (hereafter referred to as the “expression vector of the present invention”) can be obtained by inserting DNA of the present invention and a foreign gene into an adequate vector. The foreign gene may be located downstream or upstream of DNA of the present invention in the expression vector of the present invention. Alternatively, DNA of the present invention may be present in the foreign gene. Preferably, the foreign gene is located adjacent to a site downstream of DNA of the present invention. DNA of the present invention is inserted into the expression vector of the present invention in-frame with the foreign gene.

[0068] Any vector may be used without particular limitation, provided that the vector can be replicated in a host. Examples thereof include a plasmid, a shuttle vector, and a helper plasmid. When the vector is incapable of replication, a DNA fragment that becomes replicable upon insertion thereof into a host chromosome may be used.

[0069] Examples of plasmid DNAs include E. coli-derived plasmid DNAs (e.g., pBR322, pBR325, pUC118, pUC119, pUC18, pUC19, and pBluescript), Bacillus subtilis-derived plasmid DNAs (e.g., pUB110 and pTP5), and yeast-derived plasmid DNAs (e.g., a YEp plasmid such as YEp13 and a YCp plasmid such as YCp50). Examples of phage DNAs include λ phages, such as Charon4A, Charon21A, EMBL3, EMBL4, λgt10, λgt11, and λZAP. Animal virus vectors, such as retrovirus or vaccinia virus vectors, and insect virus vectors, such as baculovirus vectors, can also be used.

[0070] DNA of the present invention may be inserted into a vector by first cleaving the purified DNA with an adequate restriction enzyme, inserting the cleavage product into a restriction site or multicloning site of an adequate vector DNA, and ligating the product to a vector. With the provision of a homologous region at a part of the vector and at a part of DNA of the present invention, the vector may be ligated to DNA of the present invention via, for example, the in vitro method involving PCR or the in vivo method using yeast.

[0071] A foreign gene may be inserted into a vector at a site downstream or upstream of DNA of the present invention, or a foreign gene may be inserted into a vector so as to locate DNA of the present invention within the foreign gene in the same manner as with the insertion of DNA of the present invention into the vector.

[0072] In the expression vector according to the present invention, a foreign gene located downstream or upstream of DNA of the present invention or a foreign gene containing DNA of the present invention therein may be any protein or peptide. Examples thereof include a membrane protein and a secretory protein.

[0073] Further, a transformant can be obtained by introducing the expression vector of the present invention into a host. Any host can be used without particular limitation, provided that DNA of the present invention and a foreign gene can be expressed therein. An example thereof is yeast. Examples of yeast include Saccharomyces cerevisiae, experimental yeast, fermentation yeast, edible yeast, and industrial yeast.

[0074] The expression vector of the present invention may be introduced into yeast via any method without particular limitation, provided that DNA is introduced into yeast by such method. Examples thereof include electroporation, spheroplast, and lithium acetate methods. Also, yeast transformation involving substitution and/or insertion with a chromosome may be carried out using vectors such as a YIp vector or a DNA sequence homologous to an arbitrary region in the chromosome. Further, the expression vector of the present invention may be introduced into yeast by any method described in general experiment guidebooks or academic articles.

[0075] A transformant can also be obtained not only by introducing the expression vector of the present invention into the aforementioned yeast but also by introducing the expression vector into bacteria of Escherichia such as Escherichia coli, Bacillus such as Bacillus subtilis, or Pseudomonas such as Pseudomonas putida, animal cells such as COS cells, insect cells such as Sf9 cells, or plants belonging to genera such as Brassicaceae. When a bacterial host is used, it is preferable that the expression vector of the present invention may be capable of autonomous replication therein and that the vector may be composed of a promoter, a ribosome binding site, DNA of the present invention, a foreign gene, and a transcription termination sequence.

[0076] The expression vector of the present invention may be introduced into bacteria by any method without particular limitation, provided that DNA is to be introduced into bacteria by such method. Examples thereof include a method involving the use of calcium ions and electroporation.

[0077] When an animal cell host is used, for example, monkey cells (COS-7 cells or Vero cells), Chinese hamster ovarian cells (CHO cells), or mouse L cells may be used. The expression vector of the present invention may be introduced into animal cells by, for example, electroporation, the calcium phosphate method, or lipofection.

[0078] When an insect cell host is used, for example, Sf9 cells or the like may be used. The expression vector of the present invention may be introduced into insect cells by, for example, the calcium phosphate method, lipofection, or electroporation.

[0079] When a plant host is used, for example, the entire plant, a plant organ (e.g., a leaf, petal, stem, root, or seed), plant tissue (e.g., epidermis, phloem, parenchyma, xylem, or fibrovascular bundle), or cultured plant cells may be used. The expression vector of the present invention may be introduced into a plant host by, for example, electroporation, the agrobacterium method, the particle gun method, or PEG.

[0080] Whether or not DNA of the present invention and a foreign gene were incorporated into a host can be examined by, for example, PCR, Southern hybridization, or Northern hybridization. For example, DNA is prepared from a transformant, a DNA-specific primer is designed, and PCR is then carried out. Thereafter, the amplification product is subjected to agarose gel electrophoresis, polyacrylamide gel electrophoresis, or capillary electrophoresis, the resultant is stained with ethidium bromide or an SYBR Green solution, and the amplification product is detected as a band to confirm the transformation. Also, PCR may be carried out using a primer labeled in advance with a fluorescent dye or the like and the amplification product may be detected. Further, the amplification product may be bound to a solid phase support, such as a microplate, to confirm the amplification product via, for example, fluorescence or enzyme reactions.

[0081] In the method for producing proteins according to the present invention, the aforementioned transformant obtained with the use of the expression vector of the present invention (hereafter referred to as the “transformant of the present invention”) is cultured, and a fusion protein of the secretory signal peptide encoded by DNA according to the present invention and a protein encoded by a foreign gene is secreted and produced extracellularly or transported to and expressed in the intracellular organelles, including cell walls, cell membranes, endoplasmic reticulums, and Golgi bodies. When DNA of the present invention introduced into the transformant of the present invention is related to the gene region encoding a secretory signal peptide at moderate temperature, the transformant of the present invention is cultured at 20° C. to 42° C., and preferably at 25° C. to 37° C. When DNA of the present invention introduced into the transformant of the present invention is related to the gene region encoding a secretory signal peptide at low temperature, the transformant of the present invention is cultured at 0° C. to 20° C., and preferably at 4° C. to 15° C. Other culture conditions (e.g., the composition of the medium) for the transformant of the present invention can be adequately selected in accordance with the type of host to be used.

[0082] After the transformant of the present invention has been cultured, a protein encoded by a foreign gene can be isolated, extracted, and/or purified from the culture supernatant or culture product, as a fusion protein of the secretory signal peptide of the present invention with a protein encoded by a foreign gene. Alternatively, the secretory signal peptide of the present invention may be cleaved by, for example, signal peptidase in the transformant, and a protein encoded by a foreign gene can be selectively isolated, extracted, and/or purified from the culture supernatant or culture product. Proteins can be isolated, extracted, and purified in accordance with relevant general techniques.

[0083] According to the present invention, membrane proteins and secretory proteins can be expressed with higher efficiency than is possible with conventional membrane and secretory protein expression systems in yeast or the like with the use of secretory signal peptides. The expression system according to the present invention is superior to conventional membrane and secretory protein expression systems in terms of secretion efficiency. For example, the amount of protein production can be further increased in conventional expression of membrane proteins and secretory proteins in yeast.

### EXAMPLES

[0084] Hereafter, the present invention is described in greater detail with reference to the examples, although the technical scope of the present invention is not limited to these examples.

[0085] Concerning secretory signal peptides that are present in many of the genes encoding membrane proteins and secretory proteins in the Saccharomyces cerevisiae genome, the secretion abilities thereof were evaluated via the reporter assay system (see International Application Number: PCT/JP2006/311597, claiming the priority right of JP Patent Application No. 2005-169768) involving the use of secreted Cypridina noctiluca luciferase (hereafter referred to as “CLuc;” nucleotide sequence: SEQ ID NO: 103; amino acid sequence: SEQ ID NO: 104) as a reporter protein. CLuc is used as a mature protein lacking a naturally occurring secretory signal peptide (hereafter referred to as “mature CLuc”).

[0086] The secretory signal peptides exhibiting higher secretion efficiency than the secretory signal peptides used in conventional expression systems in yeast (see Non-Patent Documents 1 to 5) were identified in the following manner.

### Example 1

### Production of Reporter Vector pCLuRA-s

[0087] The reporter vector, pCLuRA-s, was produced utilizing a gene encoding mature CLuc as a reporter gene in the following manner.

[0088] The pUG35-MET25-EGFP3+MCS plasmid (see International Application Number: PCT/JP2006/311597, claiming the priority right of JP Patent Application No. 2005-169768) produced from pUG35 (http://mips.gsf.de/proj/yeast/info/tools/hegemann/gfp.html) was cleaved with HindIII and XbaI, the DNA fragment was fractionated via agarose gel electrophoresis, and a vector fragment of approximately 5.1 kbp was obtained. This vector fragment is hereafter referred to as “DNA fragment A.”

[0089] The pCLuRA plasmid comprises a gene having, at the 5′ end of DNA encoding mature CLue, DNA encoding the α-factor-derived secretory signal peptide ligated thereto (see International Application Number: PCT/JP2006/311597, claiming the priority right of JP Patent Application No. 2005-169768). A gene encoding mature CLuc (i.e., a protein consisting of an amino acid sequence derived from the amino acid sequence of CLuc as shown in SEQ ID NO: 104 by deletion of a secretory signal peptide sequence consisting of amino acids 1 to 18) (hereafter referred to as the “mature CLuc gene”) was amplified from the pCLuRA plasmid via PCR.

[0090] The following primers were used. cLuc ORF−Sig F+HindIII comprises at its 5′ end the HindIII cleavage site, and downstream thereof, a sequence complementary to a 21-bp region encompassing the 5′ end of the mature CLuc gene. cLuc ORF−Sig R+XbaI comprises at its 5′ end the XbaI cleavage site, and downstream thereof, a sequence complementary to a 24-bp-sequence including a termination codon of the mature CLuc gene.

[0091] cLuc ORF−Sig F+HindIII: GCGC-AAGCTT-CAGGACTGTCCTTACGAACCT (SEQ ID NO: 105)

[0092] cLuc ORF−Sig R+XbaI: GCGC-TCTAGA-CTATTTGCATTCATCTGGTACTTC (SEQ ID NO: 106)

[0093] PCR was carried out using 50 μl of a reaction solution comprising 300 nM of each primer, 1 mM MgSO₄, 200 μM dNTP (a mixed solution of 4 types of deoxynucleotide triphosphates), 1 ng of the pCLuRA plasmid, and 1× buffer and KOD-Plus-1U included in the KOD-Plus-(TOYOBO). The PCR cycle comprised: the first step at 94° C. for 2 minutes; 35 cycles of the second step at 94° C. for 15 seconds (denaturation), at 50° C. for 30 seconds (annealing), and at 68° C. for 2 minutes (elongation); and the third step at 68° C. for 5 minutes.

[0094] The amplified DNA fragment was cleaved at the restriction enzyme cleavage sites at both of its ends with HindIII and XbaI, a DNA fragment was fractionated via agarose gel electrophoresis, and a DNA fragment containing approximately 1.6 kbp of the mature CLuc gene was obtained. This DNA fragment is hereafter referred to as “DNA fragment B.”

[0095] Subsequently, DNA fragments A were ligated to DNA fragments B using the DNA Ligation Kit ver. 2.1 (TaKaRa), and the ligation products were then introduced into E. coli DH5α. The resulting transformants were cultured overnight, plasmids were extracted using the GenElute Plasmid Miniprep Kit (Sigma-Aldrich), and transformants having a plasmid of interest were identified based on the restriction enzyme cleavage patterns and via nucleotide sequence analysis. A plasmid was prepared from the transformant, the plasmid was cleaved with SpeI and BamHI, a DNA fragment was fractionated via agarose gel electrophoresis, and a DNA fragment of approximately 6.7 kbp was obtained. This DNA fragment is hereafter referred to as “DNA fragment C.”

[0096] A low-temperature-inducible promoter, i.e., an HSP12 gene promoter (hereafter referred to as “HSP12 promoter;” SEQ ID NO: 107), was amplified via PCR from the pLTex321s vector (see Patent Document 2).

[0097] The following primers were used. −610-HSP12 IGR F+SpeI comprises at its 5′ end a SpeI cleavage site, and downstream thereof, a sequence complementary to a 19-bp region encompassing the 5′ end of the HSP12 promoter region. −610-HSP12 IGR R+BamHI comprises at its 5′ end a BamHI cleavage site, and downstream thereof, a sequence complementary to a 28-bp region encompassing the 3′ end of the HSP12 promoter region.

[0098] −610-HSP12 IGR F+SpeI: GG-ACTAGT-GATCCCACTAACGGCCCAG (SEQ ID NO: 108)

[0099] −610-HSP12 IGR R+BamHI: CG-GGATCC-TGTTGTATTTAGTTTTTTTTGTTTTGAG (SEQ ID NO: 109)

[0100] PCR was carried out using 50 μl of a reaction solution comprising 300 nM of each primer, 1 mM MgSO₄, 200 μM dNTP, 1 ng of the pLTex321s vector, and 1× buffer and KOD-Plus-1U included in the KOD-Plus-. The PCR cycle comprised: the first step at 94° C. for 2 minutes; 35 cycles of the second step at 94° C. for 15 seconds (denaturation), at 50° C. for 30 seconds (annealing), and at 68° C. for 1 minute (elongation); and the third step at 68° C. for 5 minutes.

[0101] The amplified DNA fragment was cleaved at restriction enzyme cleavage sites at both ends thereof with SpeI and BamHI, a DNA fragment was fractionated via agarose gel electrophoresis, and a fragment of approximately 600 bp of the HSP12 promoter region was obtained. This fragment of the HSP12 promoter region is hereafter referred to as “DNA fragment D.”

[0102] DNA fragments C were ligated to DNA fragments D using the DNA Ligation Kit ver. 2.1, and the ligation products were introduced into E. coli DH5α. The resulting transformants were cultured overnight, plasmids were extracted using the GenElute Plasmid Miniprep Kit, and a transformant having a plasmid of interest was identified based on the restriction enzyme cleavage pattern and via nucleotide sequence analysis. The pCLuRA-s plasmid was prepared from the transformant. In the pCLuRA-s plasmid, the mature CLuc gene is inserted downstream of the HSP12 promoter.

### Example 2

### Isolation of Saccharomyces cerevisiae-derived Secretory Signal Peptide

[0103] The secretory signal peptides existing in membrane proteins and secretory proteins derived from the budding yeast Saccharomyces cerevisiae were extracted in the following manner.

[0104] Thousand and thirty seven genes included in the categories of the plasma membrane, the integral membrane, the cell periphery, the cell wall, the extracellular, the endoplasmic reticulum (ER), and Golgi from the subcellular localization table of MIPS CYGD (http://mips.gsf.de/genre/proj/yeast/), which is the Saccharomyces cerevisiae genomic database, were selected.

[0105] Based on the amino acid sequences encoded by the nucleotide sequences of the genes selected from the database, the transmembrane sites and the secretory signal peptides were predicted using the prediction programs for transmembrane sites and the prediction programs for the secretory signal peptides, such as TMHMM 2.0 (http://www.cbs.dtu.dk/services/TMHMM/), Phobius (http://phobius.cgb.ki.se/), SOSUI signal Beta (http://sosui.proteome.bio.tuat.ac.jp/˜sosui/proteome/sosuisignal/sosuisignal_submit.html), and SignalP 3.0 (http://www.cbs.dtu.dk/services/SignalP/). Based on the results of this analysis, the gene regions encoding the predicted secretory signal peptides were extracted from the aforementioned database via several prediction programs, concerning genes encoding 440 types of proteins, for which the secretory signal peptides had been predicted (Table 3).

[0106] Table 3 below shows: the systematic and common names of the genes encoding 440 types of proteins relating to the secretory signal peptides extracted from the budding yeast genome information; the nucleotide sequences and the amino acid sequences of the gene regions encoding the predicted secretory signal peptide of the protein-encoding genes (all SEQ ID NOs of these nucleotide sequences and the amino acid sequences are indicated in the rightmost column in Table 3); and the primers used for amplifying the gene regions encoding secretory signal peptides (nucleotide sequences of the synthetic primers used for the amplifying the 1st PCR products; all SEQ ID NOs of such primers are indicated in the rightmost column in Table 3).

TABLE 3

| Amino acid sequences of secretory signal peptides extracted from the budding yeast genome information, | | | | | | | | | | |
|---|---|---|---|---|---|---|---|---|---|---|
| nucleotide sequences encoding the same, and synthetic primers | | | | | | | | | | |
| | Systematic | Common | | SEQ | | SEQ | Synthetic primer | SEQ | Synthetic primer | SEQ |
| | gene name | gene name | Amino acid sequence | ID NO: | Nucleotide sequence | ID NO: | (Forward) | ID NO: | (Reverse) | ID NO: |
| 1 | YAL022c | FUN26 | KSTSADTDTIKKPILAVPEPALAD | 111 | ATGAGTACTAGTGCGGACACTGATACCATCAAGAAGCCAAT | 110 | aaatacaacaATGAGT | 888 | gacagtcctgATTTTT | 889 |
| | | | THSEEISRSGEENHESENKEHSDE | | CCTTGCGGTGCCAGAGCCTGCACTGGCCCATACGCATTCAG | | ACTAGTGCGGACA | | CAACTTTTTTCTTA | |
| | | | EGDHYSEREQSVSTEPLDTLPLKK | | AGGAGATATCACGCTCTGGAGAAGAACATGAATCAGAGAAG | | | | | |
| | | | KLKR | | AACGAGCACTCAGATGAAGAAGGCGATAATTATTCTGAAAG | | | | | |
| | | | | | AGAGCAATCTGTGTCAACCGAACCACTGGATACATTGCCGT | | | | | |
| | | | | | TAAGAAAAAAGTTGAAAAAT | | | | | |
| 2 | YBL042c | FUI1 | KPVSDSGFDNSSKTMKDDTIPTED | 113 | ATGCCGGTATCTGATTCTGGATTCGATAATTCTTCAAAAAC | 112 | aaatacaacaATGCCG | 890 | gacagtcctgAAATGT | 891 |
| | | | YEEITKESEXGDAATKITSKIDAN | | AATGAAGGACGACACTATACCGACGGAGGATTACGAAGAAA | | GTATCTGATTCTG | | CCTAATTGGATTTT | |
| | | | VIEKKDTDSENNITIAQDDEKVSV | | TCACGAAAGAGTCCGAGATGGGTGATGCGACTAAAATTACT | | | | | |
| | | | LQRVVEFFEVKWDSTQLADHXPER | | TCTAAGATTGATGCTAATGTCATTGAAAAAAAAGATACCGA | | | | | |
| | | | PIRTF | | TTCAGAAAACAATATAACCATTGCTCAGGATGACGAAAAGG | | | | | |
| | | | | | TGTCTTGGCTGCAAAGAGTTGTCGAGTTTTTTGAGGTTAAG | | | | | |
| | | | | | AATGACTCTACCGATTTGGCCGATCATAAGCCCGAAAATCC | | | | | |
| | | | | | AATTAGGACATTT | | | | | |
| 3 | YBR021w | FUR4 | MPDWLSLHLSGSSKRLHSRQLMES | 115 | ATGCCAGACAATCTATCATTACATTTAAGCGGCTCTTCAAA | 114 | aaatacaacaATGCCA | 892 | gaccgtcctgTTTCTT | 893 |
| | | | SNETFAPNQVDLEKEYKSSQSNIT | | AAGATTGAACTCTCGCCAACTTATGGAATCTTCCAATGAGA | | GACAATCTATCATT | | CCAGAATGAGCTGT | |
| | | | TEVYEASSFEEKVSSEKPQYSSFH | | CCTTTGCGCCAAATAATGTGGATTTGGAAAAAGAGTATAAG | | | | | |
| | | | KK | | TCATCTCAGAGTAATATAACTACCGAAGTTTATGAGGCATC | | | | | |
| | | | | | GAGCTTTGAAGAAAAAGTAAGCTCAGAAAAACCTCAATACA | | | | | |
| | | | | | GCTCATTCTGGAAGAAA | | | | | |
| 4 | YBR023c | CHS3 | MTGLKGDDPDDYYLAHLNQDEESL | 117 | ATGACCGGCTTGAATGGAGATGATCCTGATGACTACTATCT | 116 | aaatacaacaATGACC | 894 | gacagtcctgAAATTT | 895 |
| | | | LRSRHSVGSGAPHRQGSLVRPERS | | GAACCTTAATCAAGATGAAGAGTCTCTACTTAGGTCAAGAC | | GGCTTGAATGGA | | GCTTCTCACTGAGC | |
| | | | RLNHPDNPHFYYAQKTQEQMHHLD | | ACAGTGTCGGCTCAGGAGCACCTCATAGACAAGGCTCTTTA | | | | | |
| | | | VLPSSTGGVKPHATRRSGSLRSKG | | GTGCGGCCCGAAAGAAGCCGACTGAACAATCCTGATAATCC | | | | | |
| | | | SVRSKF | | ACATTTTTATTATGCGCAGAAAACGCAGGAGCAGATGAATC | | | | | |
| | | | | | ACCTGGATGTTTTACCATCAAGTACCGGTGTAAACCCAAAT | | | | | |
| | | | | | GCAACTCGTCGGAGTGGCTCCCTGCGGTCCAAAGGCTCAGT | | | | | |
| | | | | | GAGAAGCAAATTT | | | | | |
| 5 | YBR038w | CHS2 | MTRNPFMVEPSNGSPHRRGASNLS | 119 | ATGACGAGAAACCCGTTTATGGTGGAACCTTCGAATGGCTC | 118 | aatacaacaATGACGA | 896 | gacagtcctgAGACTC | 897 |
| | | | KFYARANSNSRVANPSEESLEDSY | | TCCTAATAGACGTGGTGCTTCAAACCTCTCCAAATTTTACG | | GAAACCCGTTT | | TTGTAGATTAGCAG | |
| | | | DGSNVFQGLPASPSRAALRVSPDR | | CAAACGCTAACAGCAACTCTCGGTGGGCTAATCCCAGTGAG | | | | | |
| | | | HHRTQFYRDSAHNSPVAPNRYAAN | | GAGAGTTTGAGGAGGATAGCTATGACCAATCTAACGTTTTC | | | | | |
| | | | LQES | | CAAGGCCTTCGGGCATCTCCTTCGAGAGCTGCACTAAGATA | | | | | |
| | | | | | CTCCCCAGACCGTCGCCATAGAACTCAATTTTACCGCGATA | | | | | |
| | | | | | GTGCCCATAACTCTCCAGTTGCTCCGAACAGGTATGCTGCT | | | | | |
| | | | | | AATCTACAAGAGTCT | | | | | |
| 6 | YBR041w | FAT1 | MSPIQVVFALSRIFLLLFRLIKLI | 121 | ATGTCTCCCATACAGGTTGTTGTCTTTGCCTTGTCAAGGAT | 120 | acatacaacaATGTCT | 898 | gacagtcctgATCCTC | 899 |
| | | | ITPIQKSLFYLFGNTFDELDRKYR | | TTTCCTGCTATTATTCAGACTTATCAAGCTAATTATAACCC | | CCCATACAGGTTGT | | CTTGTATCTATATT | |
| | | | YKED | | CTATCCAGAAATCACTGGGTTATCTATTTGGTAATTATTTT | | | | | |
| | | | | | GATGAATTAGACCGTAAATATAGATACAAGGAGGAT | | | | | |
| 7 | YBR068c | BAP2 | MLSSEDFGSSGKKETSPDSISIRS | 123 | ATGCTATCTTCAGAAGATTTTGGATCTTCTGGGAAAAAGGA | 122 | aaatacaacaATGCTA | 900 | gccagtcctgCGACTTC | 901 |
| | | | FSAGNKFQSSSSEKTYSKQXSGSD | | AACTTCTCCTGATTCGATATCGATACGTTCCTTTAGGGCCG | | TCTTCAGAAGATTT | | ATGGACTTTTTCA | |
| | | | KLIHRFADSFKRAESGSTTRTKQI | | GGAATAATTTCCAATCATCATCAAGTGAGAAAACTTATTCT | | | | | |
| | | | NENTSDLEDGVESITSDSKLKKSH | | AAGCAAAAATCCGGGAGTGACAAACTTATACATAGATTTGC | | | | | |
| | | | KS | | GGATTCATTCAAAAGAGCCGAGGGTAGCAGTACAAGAACTA | | | | | |
| | | | | | AGCAAATAAATGAAATACGTCTGATTTAGAGGATGGCGTTG | | | | | |
| | | | | | AGTCTATCACGTCGGATTCCAAGTTGAAAAAGTCCATGAAG | | | | | |
| | | | | | TCG | | | | | |
| 8 | YBR069c | TAT1 | MDDSVSFIAKEASPADYSHSLHER | 125 | ATGGACGATAGTGTCAGTTTCATTGCCAAAGAGGCCAGTCC | 124 | aaatacaacaATGGAC | 902 | gcccgtcctgAGATTT | 903 |
| | | | THSEKQXRDFTITEKQDEVSGQTA | | AGCACAATATTCGCACAGTTTGCATGAAAGAACACACAGTG | | GATAGTGTCAGTTT | | GATCGACTTTGTCA | |
| | | | EPRRTDSKSILQRKCKEFFDSFKR | | AAAAACAAAAAGAGAGACTTTACAATAACAGAAAAACAAGA | | | | | |
| | | | QLPPDRNSELESQEKKCHLTKSIK | | TGAGGTATCTGGACAAACAGCGGAGCCTCGAAGGACGGACA | | | | | |
| | | | S | | GCAAATCCATATTACAGAGGAAATGCAAAGAATTCTTCGAC | | | | | |
| | | | | | TCTTTTAAAAGGCAGCTGCCACCAGACCGTAATTCCGAACT | | | | | |
| | | | | | AGAGTCCCAAGAAAAAACAACCTGACAAAGTCGATCAAATC | | | | | |
| | | | | | T | | | | | |
| 9 | YBR086c | IST2 | MSQTITSLDPNCVIVFNKTSSANE | 127 | ATGTCGCAGACAATTACATCTCTAGATCCGAATTGTGTTAT | 126 | acctacaacaATGTCG | 904 | gacagtcctgCAGTAT | 905 |
| | | | KSLNVEFKRLNIHSIIEPGHDLQT | | TGTATTCAATAAAACTTCGAGTGCAAACGAGAAGAGTTTGA | | CAGACAATTACATC | | TTTTGATTTGCTGA | |
| | | | SYAFIRIHQDMAKPLFSFQKLDFI | | ATGTCGAATTCAAACGTTTGAATATACATTCTATTATCGAA | | | | | |
| | | | ESIIPYHDTELSDDLHXLISISKS | | CCTGGCCATGATCTGCAAACAAGCTATGCGTTTATTAGAAT | | | | | |
| | | | KIL | | CCATCAGGATAATGCGAAACCGCTTTTTTCATTTTTGCAGA | | | | | |
| | | | | | ATCTGGACTTCATTGAATCCATCATACCATATCATGATACT | | | | | |
| | | | | | GAATTGTCCGATGATTTGCATAAACTGATTTCTATCAGCAA | | | | | |
| | | | | | ATCAAAAATACTG | | | | | |
| 10 | YBR140c | IRA1 | KRQSFPQDKKHFPCEYSLTKHLFF | 129 | ATGAATCAAAGCGATCCGCAAGACAAAAAAAATTTCCCAAT | 128 | acctacaacaATGAAT | 906 | gacagtcctgAACCAA | |
| | | | DRLLLVLPIESNLKTYADVEADSV | | GGAATACTCTTTGACCAAGCATCTTTTTTTTGATAGGCTTC | | CAAAGCGATCCGCA | | TATAGAATGGGCAA | |
| | | | FRSCRSIILNIAITKDLNPIIENT | | TACTTGTTCTTCCCATAGAATCTAATTTGAAAACATATGCT | | | | | |
| | | | LGLIDLIVQDEEITSDNITDDIAN | | GATGTGGAGGCAGATTCAGTTTTCAATTCGTGTCGGTCCAT | | | | | |
| | | | SILV | | CATTTTGAATATAGCCATCAGTAAGGACTTGAACCCGATTA | | | | | |
| | | | | | TCGAAAACACATTAGGTTTAATTGACTTGATTGTGCAAGAT | | | | | |
| | | | | | GAAGAAATTACGTCTGAGAATATTACAGATGATATTGCCCA | | | | | |
| | | | | | TTCTATATTGGTT | | | | | |
| 11 | YBR294w | SUL1 | MSRKSSTEYVHMQEDADIEVFESE | 131 | ATGTCACGTAAGAGCTCGACTGAATATGTGCATAATCAGGA | 130 | aaatacaacaATGTCA | 908 | gacagtcctgTAGATT | 909 |
| | | | YRTYRESEAAEMRDGLHMGDEENG | | GGATGCTGATATCGAAGTATTTGAATCAGAATACCGCACAT | | CGTAAGAGCTCGA | | GTTTTTGATAGAAT | |
| | | | KVNSSKQKFGVTKNELSDVLYDSI | | ATAGGGAATCTGAGGCGGCAGAAAACAGAGACGGACTTCAC | | | | | |
| | | | PAYEESTVTLKEYYDHSIKNXL | | AATGGTGATGAGAAAATTGGAAGGTTAATAGTAGTAAGCAG | | | | | |
| | | | | | AAATTTGGGGTAACGAAAAATGAGCTATCAGATGTCCTGTA | | | | | |
| | | | | | CGATTCCATTCCAGCGTATGAAGAGAGCACAGTCACTTTGA | | | | | |
| | | | | | AGGAGTACTATGATCATTCTATCAAAAACAATCTA | | | | | |
| 12 | YBR298c | MAL31 | KXGLSSLIMRKKDFKDSHLDEIEN | 133 | ATGAAGGGATTATCCTCATTAATAAACAGAAAAAAAGACAG | 132 | aaatacaacaATGAAG | 910 | gacagtcctgGAGTGG | 911 |
| | | | GVNATEFHSIEKEEQGKKSDFDLS | | GAACGACTCACACTTAGATGAGATCGAGAATGGCGTGAACG | | GGATTATCCTCATT | | CATTCCCCTCT | |
| | | | HLEYGPGSLIPKDWNEEVPDLLDE | | CTACCGAATTCAACTCGATAGAGATGGAGGAGCAAGGTAAG | | | | | |
| | | | ANQDAKEADESERGMPL | | AAAAGTGATTTTGATCTTTCCCATCTTGAGTACGGTCCAGG | | | | | |
| | | | | | TTCACTAATACCAAACGATAATAATGAAGAAGTCCCCGACC | | | | | |
| | | | | | TTCTCGATGAAGCTATGCAGGACGCCAAAGAGGCAGATGAA | | | | | |
| | | | | | AGTGAGAGGGGAATGCCACTC | | | | | |
| 13 | YCL025c | AGP1 | MSSSKSLYELKDLKNSSTEIKATG | 135 | ATGTCGTCGTCGAAGTCTCTATAGGAACTGAAAGACTTGAA | 134 | acatccaacaATGTCG | 912 | gacagtcctgTTCTAG | 913 |
| | | | QDNEIEVFETGSHDRPSSQPHLGY | | AAATAGCTCCACAGAAATACATGCCACGGGGCAGGATAATG | | TCGTCGAAGTCTCT | | TTCTTGAGCCTGTC | |
| | | | EQHNTSAVRRFFDSFKRADQGPQD | | AAATTGAATATTTCGAAACAGGCTCCAATGACCGTCCATCC | | | | | |
| | | | EVEATQHNDLTSAISPSSRGAQEL | | TCACAACCTCATTTAGGTTACGAACAGCATAACACTTCTGC | | | | | |
| | | | E | | CGTGCGTAGGTTTTTCGACTCCTTTAAAAGAGCGGATCAGG | | | | | |
| | | | | | GTCCACAGGATGAAGTAGAAGCAACACAAATGAACGATCTT | | | | | |
| | | | | | ACGTCGGCTATCTCACCTTCTTCTAGACAGGCTCAAGAACT | | | | | |
| | | | | | AGAA | | | | | |
| 14 | YCR011c | ADP1 | MGSHRRYLYYSILSFLLLSCSVVL | 137 | ATGGGAAGTCATCGACGTTATCTCTACTATAGTATATTATC | 138 | aaatacaacaATGGGA | 916 | gacagtcctgCGGTGA | 917 |
| | | | AKQDKTPFFEGTSSKNSWLTAQDX | | ATTTCTATTATTATCCTGCTCAGTGGTACTTGCAAAACAAG | | AGTCATCGACGTTA | | TAGACCGCCA | |
| | | | GHDTCPPCFNCHLPIFECKQFSEC | | ATAAGACCCCATTCTTTGAAGGTACTTCTTCGAAAAATTCG | | | | | |
| | | | HSYTGRECCIEGFAGDCGSLPLCG | | CGTCTAACTGCACAAGATAAGGGCAATGATACATGCCCGCC | | | | | |
| | | | GLSP | | ATGTTTTAATTGTATGCTACCTATTTTTGAATGCAAACAGT | | | | | |
| | | | | | TTTCTGAATGCAATTCGTACACTGGTAGATGTGAGTGTATA | | | | | |
| | | | | | GAAGGGTTTGCAGGTGATGATTGCTCTCTGCCCCTCTGTGG | | | | | |
| | | | | | CGGTCTATCACCA | | | | | |
| 19 | YCR034w | FEN1 | MNSLVTQYAAPLFERYPQLHDYLP | 145 | ATGAATTCACTCGTTACTCAATATGCTGCTCCGTTGTTCGA | 144 | aaatacaacaATGAATT | 924 | gacagtcctgTTCACCT | 925 |
| | | | LERPFFNISLNEHFDDVVTRVTNG | | GCGTTATCCCCAACTTCATGACTATTTACCAACTTGGAGCG | | CACTCGTTACTGA | | GCAATGAATTGG | |
| | | | RFVPSEFQFIAGE | | ACCATTTTTTAATATTTCGTTGTGGGAACATTTCGATGATG | | | | | |
| | | | | | TCGTCACTCGTGTAACTAACGGTAGATTTGTTCCAAGCGAA | | | | | |
| | | | | | TTCCAATTCATTGCAGGTGAA | | | | | |
| 20 | YCR098c | GIT1 | MEDKEITSVHEKEVWENTMPRIIA | 147 | ATGGAAGACAAAGATATCACATCGGTAAATGAGAAGGAAGT | 146 | aaatccaacaATGGAAG | 926 | gccagtcctgCACTTTT | 927 |
| | | | KYDAERRATQTERSKKDKVKNIVT | | GAACGAGAACACTAATCCTAGAATAATAAAATATGATGCCG | | ACAAGATATCAC | | GAGCTATAGTTTT | |
| | | | IIASGFALISDGYVWGSHSMLNKV | | AGAGGCGTGCAACCCGTACTGAAACCTCAAAGAAAGATAAA | | | | | |
| | | | FVWEYGKKNYSSKV | | TGGAAAAATAGTTACAATCATTGCGTCCGGTTTTGCTCTGA | | | | | |
| | | | | | TAAGTGATGGTTACGTAAATGGTTCAATGAGTATGCTAAAC | | | | | |
| | | | | | AAGGTTTTTGTTATGGAGTACGGTAAGAAAAACTATAGCTC | | | | | |
| | | | | | AAAAGTG | | | | | |
| 21 | YDL035c | GPR1 | MITEGFFPPMLNALKGSSLLEKRV | 149 | ATGATAACTGAGGGATTTCCCCCGAATTTAAACGCGTTGAA | 148 | aaatacaacaATGATAA | 928 | gacagtcctgTAACTGCA | 929 |
| | | | DSLRQLNTTTVHQLLGLPGMTTST | | AGGGTCATCCTTACTAGAAAAGAGAGTTGATTCTCTCCGAC | | CTGAGGGATTTCC | | ACAGTGCGG | |
| | | | FTAPQLLQL | | AGCTTAACACTACCACGGTTAACCAGCTGCTGGGGTTGCCG | | | | | |
| | | | | | GGGATGACCTCTACATTCACGGCTCCGCAACTGTTGCGTTA | | | | | |
| 22 | YDL138w | RGT2 | KNDSQNCLRQREENSHLNPGNDFG | 151 | ATGAACGATAGCCAAAACTGCCTACGACAGAGGGAAGAAAA | 150 | aatacaacaATGAACGA | 930 | gacagtcctgTAGTAGAA | 931 |
| | | | HHQGAECTNHKNMPHRMAYTESTN | | TAGTCATCTGAATCCTGGAAATGACTTCGGCCACCACCAGG | | TAGCCAAAACTG | | TGGACGTGGTTT | |
| | | | DTEACSIVCCDDPNAYQISYYNNE | | GTGCAGAATGTACGATAAATCATAACAACATGCCACACCGC | | | | | |
| | | | PAGDGAIETTSILL | | AATGCATACACAGAATCTACGAATGACACGGAAGCAAAGTC | | | | | |
| | | | | | CATAGTGATGTGCGACAGATCCTAACGCATACCAAATTTCC | | | | | |
| | | | | | TACACAAATAATGAGCCGGCGGGGAGATGGAGCTATAGAAA | | | | | |
| | | | | | CCACGGTCCATTCTACTA | | | | | |
| 23 | YDL194w | SNF3 | KDPHSNSSSTLRQEKQGFLDKALQ | 153 | ATGGATCCTAATAGTAACAGTTCTAGCGAAACATTACGCCA | 152 | aaatacaaaccATGGAT | 932 | gacagtcctgAGATTGTT | 933 |
| | | | RVKGIALRRANNSKXDHTTDDTTG | | AGAGAAACAGGGTTTCCTAGACAAAGCTCTTCAGAGGGGTG | | CCTAATAGTAACAG | | TCTGAGGAGGCT | |
| | | | SIRTPTSLQRQNSDRQSNQTSVFT | | AAGGGCATAGCACTGCGACGAAACAATAGTAACAAAGATCA | | | | | |
| | | | DDISTIDDNSILFSEPPQKQS | | TACAACAGATGATACGACAGGTAGCATACGAACCCCTACGA | | | | | |
| | | | | | GCTTGCAGCGGCAAAATTCTGACAGGCAATCTAATATGACA | | | | | |
| | | | | | TCCGTGTTTACGGATGACATTTCTACGATAGACGACAACTC | | | | | |
| | | | | | AATTTTATTTCAGAGCCTCCTCAGAAACAATCT | | | | | |
| 24 | YDL210w | UGA4 | MSKISSKKENKISVEQRISTDIGQ | 155 | ATGAGTATGTCAAGCAAAAACGAGAATAAGATATCAGTAGA | 154 | aaatacaacaATGAGTA | 934 | gacagtcctgTGAAAATT | 935 |
| | | | AYQLQGLGSNLRSIRSKTGAGEVN | | ACAAAGAATATCCACTGATATCGGTCAGGCTTACCAGTTAC | | TGTCAAGCAAAAA | | GTCTTTTTAATT | |
| | | | YIDAAKSVNDKQLLAEIGYKQELK | | AAGGCCTTGGGTCTAACCTAAGGTCGATTCGCTCCAAGACT | | | | | |
| | | | RQFS | | GGTGCCGGTGAAGTGAACTATATCGATGCTGCTAAATCTGT | | | | | |
| | | | | | AAATGATAACCAACTGCTTGCAGAGATCGGTTATAAACAAG | | | | | |
| | | | | | AATTAAAAAGACAATTTTCA | | | | | |
| 25 | YDL245c | HXT15 | DASEQSSPEIRADWLNSSAADVHV | 157 | ATGGCAAGCGAACAGTCCTCACCAGAAATTAATGCAGATAA | 156 | aaatacaacaATGCAAG | 936 | gacagtcctgTCTCTTCG | 937 |
| | | | QPPGEKEHSDGFYDXEVINGNTPD | | TCTAAACAGTAGTGCAGCTGACGTTCATGTACAGCCACCCG | | CGAACAGT | | GTGCGTCTG | |
| | | | APKR | | GAGAGAAAGAATGGTCAGACGGGTTTTATGACAAAGAAGTC | | | | | |
| | | | | | ATTAATGGAAATACGCCAGACGCACCGAAGAGA | | | | | |
| 26 | YDL247w | MPH2 | KXMLSFLIKRRKERTSDSHVYPGK | 159 | ATGAAAAACTTATCTTTTCTCATAAACAGAAGAAAGGAAAA | 158 | aaatacaacaATGAAAA | 938 | gccagtcctgCATTCCTC | 939 |
| | | | AKSHEPSHIENDDQTKKDGLDIVH | | TACAAGTGACTCGAATGTATACCCAGGAAGGCTAAGTCGCA | | ACTTATCTTTTCT | | TTTCACTTTCG | |
| | | | VEFSPDTRAPSDSKKVITEIFDAT | | TGAACCCAGCTGGATAGAAATGGATGATCAAACTAAGAAGG | | | | | |
| | | | EDAKEADESERGH | | ACGGCTTAGATATTGTTCATGTTGAGTTCAGTCCGGATACA | | | | | |
| | | | | | AGAGCGCCAAGCGATAGCAATAAAGTAATAACAGAGATATT | | | | | |
| | | | | | TGACGCTACTGAGGATGCCAAGGAGGCAGACGAAAGTGAAA | | | | | |
| | | | | | GAGGAATG | | | | | |
| 27 | YDR011w | SNQ2 | KSHIKSTQDSSHNAVARSSSASFA | 161 | ATGAGCAATATCAAAAGCACGCAAGATAGCTCTCATAATGC | 160 | aaatacaccaATGAGCA | 940 | gacagtcctgATCTGAAT | 941 |
| | | | ASEESFTGITNDXDEQSDTPADXL | | TGTCGCTAGAAGCTCAAGCGCTTCTTTTGCAGCTTCAGAAG | | ATATCAAAAGCAC | | CCATATTAAAGG | |
| | | | TKMLTGPARDTASQISATYSEMAP | | AATCATTTACGGGCATAACCCATGACAAAGATGAGCAGAGC | | | | | |
| | | | DVVSKVESFADALSRHTTRSGAFK | | GATACCCCGGCGGATAAACTAACAAAAATGCTGACAGGACC | | | | | |
| | | | NDSD | | TGCAAGAGACACTGCGAGCCAGATTAGTGCCACTGTGTCTG | | | | | |
| | | | | | AAATGGCGCCAGATGTCGTATCTAAAGTGGAGTCATTTGCA | | | | | |
| | | | | | GATGCACTATCCCGTCATACAACGAGAAGCGGTGCCTTTAA | | | | | |
| | | | | | TATGGATTCAGAT | | | | | |
| 28 | YDR033w | MRH1 | MSTFETLIKRGGNEAIKINPPTGA | 163 | ATGTCTACCTTTGAAACTTTAATTAAAAGAGGTGGTAACGA | 162 | aaatacaacaATGTCTA | 942 | gacagtcctgATCGGAAC | 943 |
| | | | DFHITSRGSD | | AGCCATCAAAATTAACCCTCCAACCGGTGCGGATTTCCACA | | CCTTTGAAACTTT | | CACGACTAGTGA | |
| | | | | | TCACTAGTCGTGGTTCCGAT | | | | | |
| 29 | YDR046c | BAP3 | HSDPIVTSSKHEKSAEFEVTDSAL | 165 | ATGTCAGATCCTATAGTAACGTCTTCCAAAATGGAAAAAAG | 164 | aaatacaacaATGTCAG | 943 | gacagtcctgTCTAGATT | 945 |
| | | | YNHFNTSTTASLTPEIKEHSEESR | | TGCAGAGTTTGAAGTAACAGACTCTGCTTTATATAATAACT | | ATCCTATAGTAAC | | TCATTGACTTTT | |
| | | | NGLVHRFVDSFRRAEQSRLEENDL | | TCAATACATCAACAACAGCTTCACTAACTCCGGAGATTAAG | | | | | |
| | | | EDDGTKSHKSMKHLKKSNXSR | | GAACATTCTGAGGAATCTCGCAATGGGTTAGTTCACAGATT | | | | | |
| | | | | | CGTCGACTCATTCAGAAAGAGCCAAAGCCAACGTTTAGAAG | | | | | |
| | | | | | AAGACAATGACTTGGAGGATGGTACCAATCGATGAAATCTA | | | | | |
| | | | | | ATAACCACTTAAAAAAGTCAATGAAATCTAGA | | | | | |
| 30 | YDR093w | DNF2 | NSSPSKPTSPFVDDIEHESGSASW | 167 | ATGTCAAGTCCCTCCAAACCCACTTCTCCCTTCGTGGATGA | 166 | aaatacaacaATGTCAA | 946 | gacagtcctgTTTTTTTA | 947 |
| | | | GLSSHSPFDDSFQFEKPSSAHGHI | | TATTGAGCATGAATCGGGATCAGCATCTAATGGTCTGTCGT | | GTCCCTCCAAA | | CCATTGAGTTCAT | |
| | | | IEVAKTGGSVLKRQSKPEXDISTP | | CCATGTCACCATTTGACGATAGTTTTCAATTTGAAAAACCC | | | | | |
| | | | DLSKVTFDGIDDYSKDVDIHDDDE | | AGTAGTGCGCATGGAAATATTGAAGTAGCGAAAACCGGCGG | | | | | |
| | | | LNGKK | | TTCTGTTTTGAAGCGACAATCTAAGCCAATGAAAGATATTA | | | | | |
| | | | | | GCACACCCGATCTCTCAAAAGTTACTTTTGATGGAATCGAT | | | | | |
| | | | | | GATTATAGTAACGTAATGATATTAATGATGATGATGAACTC | | | | | |
| | | | | | AATGGTAAAAAA | | | | | |
| 31 | YDR276c | PMP3 | MDSAKIINIILSLFLPPVAVFLAR | 78 | ATGGATTCTGCCAAGATCATTAACATTATATTATCCCTTTC | 77 | aaatacaacaATGGATT | 948 | gacagtcctgGATATCCA | 949 |
| | | | GWGTDCIVDI | | TTACCACCAGTCGCCGTTTTTCTAGCCCGTGGGTGGGGTAC | | CTGCCAAGATCA | | CTATACAGTCAG | |
| | | | | | TGACTGTATAGTGGATATC | | | | | |
| 32 | YDR342c | HXT7 | KSQDAAIAEQTPVEHLSAVDSASH | 169 | ATGTCACAAGACGCTGCTATTGCAGAGCAAACTCCTGTGGA | 168 | aaatacaacaATGTCAC | 950 | gacagtcctgTCTCTTTG | 951 |
| | | | SVLSTPSKXAERDEIKAYGEGEEW | | GCATCTCTCTGCTGTTGACTCAGCCTCCCACTCGGTTTTAT | | AAGACGCTGCTAT | | GAATTTCAACGA | |
| | | | EPVVEIPKR | | CTACACCATCAAACAAGGCTGAAAGAGATGAAATAAAAGCT | | | | | |
| | | | | | TATGGTGAAGGTGAAGAGCACGAACCTGTCGTTGAAATTCC | | | | | |
| | | | | | AAAGAGA | | | | | |
| 33 | YDR343c | HXT6 | HSQDAAIAEQTVEHLSAVDSASHS | 171 | ATGTCACAAGACGCTGCTATTGCAGAGCAAACTCCTGTGGA | 170 | aaatacaacaATGTCAC | 952 | gacagtcctgTCTCTTTG | 953 |
| | | | VLSTPSKXAERDEIKAYGEGEEHE | | GCATCTCTCTGCTGTTGACTCAGCCTCCCACTCGGTTTTAT | | AAGACGCTGCTAT | | GAATTTCAACGA | |
| | | | PVVEIPRK | | CTACACCATCAAACAAGGCTGAAAGAGATGAAATAAAAGCT | | | | | |
| | | | | | TATGGTGAAGGTGAAGAGCACGAACCTGTCGTTGAAATTCC | | | | | |
| | | | | | AAAGAGA | | | | | |
| 34 | YDR345c | HXT3 | HNSTPDLISPQXSSENSNADLPSN | 173 | ATGAATTCAACTCCAGATTTAATATCTCCACAAAAGTCAAG | 172 | aaatacaacaATGAATT | 954 | gacagtcctgTTTACCTGTATT | 955 |
| | | | SSQVCXMPEEKGVQDDFQSEDQVL | | TGAGAATTCGAATGCTGACCTGCCTTCGAATAGCTCTCAGG | | CAACTCCAGATTT | | TGGGTTGG | |
| | | | TNPWTGK | | TAATGAACATGCCTGAAGAAAAAAGGTGTTCAAGATGATTT | | | | | |
| | | | | | CCAAGCTGAGGCCGACCAAGTACTTACCAACCCAAATACAG | | | | | |
| | | | | | GTAAA | | | | | |
| 35 | YDR384c | ATO3 | MTSSASSPQDLEKGENTLENIETL | 175 | ATGACATCGTCTGCTTCTTCTCCACAGGATTTGGAAAAGGG | 174 | aactacaacaATGACAT | 956 | gacagtcctgGAACTGGTGCGG | 957 |
| | | | PQGSIAGVSQGFPNIQEIYSDRDF | | TGTGAACACTCTAGAAAATATTGAGACGCTCCCCCAGCAGG | | CGTCTGCTTCTTC | | AGTATA | |
| | | | ITLGSSTYRRRDLLNLDRGDEEGN | | GTTCGATTGCAGGCGTTTCGCAGGGCTTCCCTAATATTCAA | | | | | |
| | | | CAKYTPWQF | | GAGATATACTCCGACAGAGACTTCATTACTCTAGGATCCTC | | | | | |
| | | | | | CACCTACAGGCGCAGAGATTTGCTCAATGCACTAGACAGAG | | | | | |
| | | | | | GGGATGGGGAGGAAGGAAACTGTGCAAAGTATACTCCGCAC | | | | | |
| | | | | | CAGTTC | | | | | |
| 36 | YDR420w | HKR1 | HVSLKIKKILLLVSLLHAIEAYSN | 2 | ATGGTCTCATTGAAAATAAAAAAAATTTTACTCCTGGTGTC | 1 | aactcccccaATGGTCT | 958 | gcccgtcctgTTGCGTTGTCGT | 959 |
| | | | DTIYSTSYHKSGIESTPSYSTSAI | | ATTGTTAAATGCAATCGAGGCCTATAGTAACGATACAATAT | | CATTGAAAATAAA | | CGTCA | |
| | | | SSTGSSNKEQAITSSSETTTMAGQ | | ATTCAACTTGATACAATAATGGAATAGAAAGCACACCCTCA | | | | | |
| | | | YGESGSTTICDEQETGTSSQYISV | | TATTCAACATCCGCGATATCCAGTACCGGATCTAGCAACAA | | | | | |
| | | | TTTTQ | | AGAGAATGCAATAACATCAAGCTCTGAAACCACCACAATGG | | | | | |
| | | | | | CTGGCCAATATGGTGAAAGTGGAAGCACAACAATAATGGAT | | | | | |
| | | | | | GAACAAGAAACTGGTACGTCCAGCCGAGTATATTAGTGTGA | | | | | |
| | | | | | CGACGACAACGCAA | | | | | |
| 37 | YDR497c | ITR1 | KQIHIPYLTSKTSQSHVGDAVGNA | 177 | ATGGGAATACACATACCATATCTCACGTCAAAGACATGGCA | 176 | aaatacaacaATGGGAA | 960 | GACAGTCCTGgttaaaagtgat | 961 |
| | | | DSVEFNSEHDSPSKRGKITLESHE | | ATCAAATGTTGGTGATGCCGTTGGCAACGGTGATAGTGTAG | | TACACATACCATA | | catgaccg | |
| | | | IGRAPASQDEDRIQIKPVHDEDQT | | AGTTCAACAGTGAGCATGACTCACCTTCAAAGAGAGGTAAA | | | | | |
| | | | SVDITFN | | ATTACACTTGAGTCACATGAAATACAGAGGGCTCCCGCTAG | | | | | |
| | | | | | CGATGATGAAGATAGGATTCAAATTAAACCCGTGAACGACG | | | | | |
| | | | | | AGGATGACACGTCGGTCATGATCACTTTTAAC | | | | | |
| 40 | YEL083c | CAN1 | MTRSKEDADIEEKHKYNEVTTLFH | 183 | ATGACAAATTCAAAAGAAGACGCCGACATAGAGGAGAAGCA | 182 | aaatacaacaATGACA | 966 | gacagtcctgTCTTGC | 967 |
| | | | DVEASQTHHRRGSIPLKDEKSKEL | | TATGTACAATGAGCCGGTCACAACCCTCTTTCACGACGTTG | | AATTCAAAAGAAGA | | TTAAGCTCTCTC | |
| | | | YPLRSFPTRVNGEDTFSKEDGIGE | | AAGCTTCACAAACACACCACAGACGTGGGTCAATACCATTG | | | | | |
| | | | DEGEVQNAEVKRELKQR | | AAAGATGAGAAAAAGTAAAGAATTGTATCCATTGCGCTCTT | | | | | |
| | | | | | TCCCGACGAGAGTAAATGGCGAGGATACGTTCTCTATGGAG | | | | | |
| | | | | | GATGGCATAGGTGATGAAGATGAAGGAGAAGTACAGAACGC | | | | | |
| | | | | | TGAAGTGAAGAGAGAGCTTAAGCAAAGA | | | | | |
| 41 | YEL065w | SIT1 | KDPGIANHTLPEEFEEVVPEHLEK | 185 | ATGGACCCTGGTATTGCTAATCATACCCTCCCCGAGGAATT | 184 | aactccaacaATGGAC | 968 | gacagtcctgGTTGTA | 969 |
| | | | VGAKVDVKPTLTTSGPAPSYIELD | | TGAAGAGGTTGTCGTTCCCGAGATGCTGGAAAGGAAGTAGG | | CCTGGTATTGCTAA | | CATTTCTGCGTAAA | |
| | | | PGVHKIIEIYAEEYN | | AGCCAAGGTCGATGTCAAGCCAACACTAACCACATCTTCTC | | | | | |
| | | | | | CAGCACCTTCTTACATTGAATTGATAGATCCAGGTGTGCAT | | | | | |
| | | | | | AACATCGAGATTTACGCAGAAATGTACAAC | | | | | |
| 42 | YEL069c | HXT13 | KSSAQSSIDSDGDVRDADIHVAPP | 187 | ATGTCTAGTGCGCAATCCTCTATTGATAGCGATGGAGATGT | 186 | aaatacaaacaATGTC | 970 | gacagtccgTCTTTTT | 971 |
| | | | VEKRWSDGFDDNEVIRGDNVEPPX | | TCGAGATGCTGATATTCATGTCGCACCACCCGTGAAAAAGA | | TAGTGCGCAATCCT | | GGTGGCTGAAC | |
| | | | R | | GTGGTCAGATGGATTTGATGACAACGAAGTCATAAACGGGG | | | | | |
| | | | | | ATAACGTTGAGCCACCAAAAAGA | | | | | |
| 43 | YER008c | SEC3 | KRSSKSPFKRKSHSRETSHDENTS | 189 | ATGAGGTCCTCGAAGTCTCCTTTTAAAAGGAAGTCTCACAG | 188 | aaatacaacaATGAGG | 972 | GACAGTCCTGcttatg | 973 |
| | | | FFHKRTISGSSAHHSRNVSQGAVP | | TCGTGAGACATCACACGATGAAAACACATCGTTTTTCCACA | | TCCTCGAAGTCT | | gtcgggtctggaaa | |
| | | | SSAPPYVSGGMYSHXRNVSRASRS | | AGAGAACAAATATCCGGTAGCAGTGCTCACCATTCTAGAAA | | | | | |
| | | | SQTSNFLAEQY | | CGTCAGTCAAGGTGCAGTACCCTCTTCCGCACCACCTGTTT | | | | | |
| | | | | | CTGGTGGAAATTATTCGCATAAGAGAAACGTGTCGAGAGCT | | | | | |
| | | | | | TCAAATTCCTCTCAAACTTGAATTTTTTAGCCGAACAATAT | | | | | |
| | | | | | GAAAGGGATAGGAAAGCCATAATTAATTGCTGCTTTTCCAG | | | | | |
| | | | | | ACCCGACCATAAG | | | | | |
| 44 | YER056c | FCY2 | KLEEGNVYEIQQLEKRSPYIGSSL | 191 | ATGTTGGAAGAGGAAATAATGTTTACGAAATCCAAGACTTG | 190 | aaatacaaaca | 974 | gacagtcctgATTCAG | 975 |
| | | | ENEKKVAASETFTATSEDDQQYIV | | GAGAAGAGATCTCCTGTAATAGGCTCAAGCTTGAAAACGAA | | ATGTTGGAAGAGGAAAT | | TATGGAATCGTCCG | |
| | | | ESSEATKSLHRFKFFASNAETKGV | | AAGAAGGTAGCCGCTTCTGAAACTTTCACAGCAACTTCCGA | | | | | |
| | | | EPVTEDEKTSSILN | | AGTGACCAACAGTATATCGTTGAATCATCAGAGGCCACAAA | | | | | |
| | | | | | ATTATCGTGGTTCCATAAGTTCTTTGCCAGTTTGAATGCAG | | | | | |
| | | | | | AAACAAAGGGTGTTGAACCAGTTAGAGAGGATGAAAAAAAC | | | | | |
| | | | | | GGACGATTCCATACTGAAT | | | | | |
| 45 | YER072w | VTC1 | DSSAPLLQRTPGKKAILPTRVEPK | 193 | ATGTCTTCAGCACCATTATTACAAAGAACACCTGGGAAAAA | 192 | aaatacaacaATGTCT | 976 | gacagtcctgCAAAAA | 977 |
| | | | VFFANERTFL | | GATCGCTTTGCCCACACACGAGTTGAGCCAAAAGTGTTCTT | | TCAGCACCATTATT | | GGTACGCTCATTGG | |
| | | | | | TGCCAATGAGCGTACCTTTTTG | | | | | |
| 46 | YER118c | SHO1 | MSISSKIRPTPRKPSRCIATDHSF | 195 | ATGTCAATATCATCAAAGATAAGACCAACTCCTCGTAAACC | 914 | aaatacaacaATGTCAATATCATC | 978 | gacagtcctgAAAACG | 979 |
| | | | KDKKFYADPFAISSISLAIVSVVI | | TTCACGTATGGCTACCGACCATTCTTTTAAAATGAAAAATT | | AAAGAT | | TGGGAAGGATTC | |
| | | | ATGGSISSASSTNESFPRF | | TTATGCCGATCCTTTCGCTATATCATCAATTTCTTGGCAAT | | | | | |
| | | | | | TGTATCGTGGGTCATCGCCATCGGGGGCTCCATCTCATCTG | | | | | |
| | | | | | CATCCACCAATGAATCCTTCCCACGTTTT | | | | | |
| 47 | YER145c | FTR1 | HPNKVFNVAVFFVVFRECLEAVIS | 197 | ATGCCTAACAAAGTGTTTAACGTGGCCGTTTTCTTCGTTGT | 196 | aaatacaaacaATGCC | 980 | gacagtcctgCTGAAT | |
| | | | ISVLLSFLKQAIGEHDRALYRKRI | | GTCAGAGAGTGCTTGGAAGCAGTGATTGTTATTTCCGTGCT | | TAACAAAGTGTTTAA | | CCTTAATTTACGGT | |
| | | | Q | | GCTATCGTTTTTTGAAACAGGCAATCGGGAACATGACCGGG | | | | | |
| | | | | | CGCTGTACCGTAAATTAAATTCAG | | | | | |
| 48 | YER166w | DNF1 | WSGTFKGDGHAPNSPFEDTFQFED | 199 | ATGTCTGGAACTTTTCATGGCGATGGGCATGCTCCCATGTC | 198 | aaatacaacaATGTCT | 982 | gacagtcctgTAATTC | 983 |
| | | | NSSNEDIHIAPTHFDDGATSKKYS | | GCCCTTTGAAGATACATTTCAATTTGAAGATAATAGCAGTA | | GGAACTTTTCATGG | | CACATCATCAAACG | |
| | | | RPQVSFNDETPKKKREDAEEFTFN | | ATGAAGATACACATATTGCACCTACCCATTTTGATGATGGT | | | | | |
| | | | KKTEYDNHSFQPTPKLNNGSGTFD | | GCAACAAGCAACAAATACAGCCGGCCACAGGTCAGCTTCAA | | | | | |
| | | | DVEL | | TGATGAAACACCCAAAAATAAACGTGAAGATGCAGAAGAAT | | | | | |
| | | | | | TCACATTTAACGATGACACAGAATATGACAATCATTCCTTT | | | | | |
| | | | | | CAGCCAACACCGAAACTTAATAATGGATCTGGGACGTTTGA | | | | | |
| | | | | | TGATGTGGAATTA | | | | | |
| 49 | YFL011w | HXT10 | HVSSSVSILGTSAKASTSLRKDEI | 201 | ATGGTTAGTTCAAGTGTTTCCATTTTGGGGACTAGCGCCAA | 200 | acatacaacaTGGTTA | 984 | gacagtcctgGGGTTT | 985 |
| | | | TKLTPETREASLDIPYKP | | GGCATCCACTTCTCTAAGTAGAAAGGATGAAATTAAACTAA | | GTTCAAGTGTTTC | | GTATGGAATGTCCA | |
| | | | | | CCCCTGAAACAAGGGAAGCTAGCTTGGACATTCCATACAAA | | | | | |
| | | | | | CCC | | | | | |
| 50 | YFL026w | STE2 | HSDAAPSLSNLFYDPTYNPGQSTI | 203 | ATGTCTGATGCGGCTCCTTCATTGAGCAACTATTTTATGAT | 202 | aaatacaacaATGTCT | 986 | gacagtcctgaACCTT | 987 |
| | | | NYTSIYGNGSTITFDELDQ | | CCAACGTATAATCCTGGTCAAAGCACCATTAACTACACTTC | | GATGCGGCTCCTT | | GCAACTCATCGAA | |
| | | | | | CATATATGGAATGGATCTACCATCACTTTCGATGAGTTGCA | | | | | |
| | | | | | AGGT | | | | | |
| 51 | YFL041w | FET5 | MLFYSFVHSVLAASVALAKTHXLN | 205 | ATGTTCTTCTACTCGTTCGTGTGGTCTGTACTGGCCGCTAG | 204 | aaatacaacaATGTTG | 988 | gacagtcctgCATAGA | 989 |
| | | | YTASWVTANPDGLHEXRWIGHNGE | | TGTTGCTTTGGCAAAGACACATAAGTTAAACTATACCGCTT | | TTCTACTCGTTCGT | | AGGACCATCCATT | |
| | | | HPLPDIHVEKGDRVELYLTNGFQD | | CTTGGGTAACTGCCAATCCTGATGGATTGCATGAAAAAAGG | | | | | |
| | | | NTATSLHFHGLFQNTSLQNQLQND | | ATGATTGGTTTTAATGGCGAATGGCCACTTCCAGATATCCA | | | | | |
| | | | GPSSI | | TGTTGAAAAAGGAGATCGTGTTGAGCTTTATTTGACTAACG | | | | | |
| | | | | | GCTTTCAAGACAATACTGCTACTTCTCTACATTTCCATGGT | | | | | |
| | | | | | CTTTTCCAGAATACGAGTTTGGGGAACCAGCTTCAAATGGA | | | | | |
| | | | | | TGGTCCTTCTATG | | | | | |
| 52 | YFL050c | ALR2 | MSSLSTSFDSSSDLPRSKSVDNTA | 207 | ATGTCGTCCTTATCCACTTCATTTGATTCATCGTCAGATTT | 206 | aaatacaacaATGTCG | 9909 | gacagtcctgTTCTGC | 991 |
| | | | ASSKTGKYPKLENYRGYSDAQPIR | | ACCAAGGTCAAAACCGTTGACAATACGGCGGCTTCCATGAA | | TCCTTATCCACTTC | | TTCACCTCAAA | |
| | | | HEALALKVDETKDSRHXFSSSNGE | | GACAGGCAAGTACCCAAAATTAGAGAACTATAGGCAGTATT | | | | | |
| | | | NSGVENGGYVEKTNISTSGRNDFE | | CTGATGCACAACCAATACGTCACGAAGCGCTTGCATTGAAA | | | | | |
| | | | GEAE | | GTGGACGAAACGAAAGATTCTAGACACAAATTTAGTTCCTC | | | | | |
| | | | | | TAACGGGGAGAATAGTGGAGTGGAAAATGGAGGCTATGTGG | | | | | |
| | | | | | AGAAAACGAATATATCCACAAGTGGCCGCATGGATTTTGAA | | | | | |
| | | | | | GGTGAAGCAGAA | | | | | |
| 53 | YGL008c | PMA1 | MTDTSSSSSSSSASSVSAHQPTQE | 209 | ATGACTGATACATCATCCTCTTCATCATCCTCTTCAGCATC | 208 | acatacaagaATGACT | 992 | gacagtcctgGTACTT | 993 |
| | | | KPAKTYDDAASESSDDDDIDALIE | | TTCTGTTTCAGCTCATCAGCCAACTCAAGAAAAGCCTGCTA | | GATACATCATCCTC | | CTTTCTTCTTTTCA | |
| | | | ELQSNHGVDDEDSDNDGPVAAGEA | | AGACTTACGATGACGCTGCATCTGAATCTTCTGACGATGAC | | | | | |
| | | | RPVPEEYLQTDPSYGLTSDEVLKR | | GATATCGATGCTTTAATCGAAGAACTACAATCTAATCACGG | | | | | |
| | | | RKKY | | TGTCGACGACGAAGACAGTGATAACGATGGTCCAGTTGCCG | | | | | |
| | | | | | CCGGTGAAGCTAGACCAGTTCCAGAAGAATATTTAGAAACT | | | | | |
| | | | | | GACCCATCTTACGGTTTAACTTCCGATGAAGTTTTGAAAAG | | | | | |
| | | | | | AAGAAAGAAGTAC | | | | | |
| 54 | YGL077c | HNM1 | HSIRNDWASGGYHQPDQSSNASHH | 211 | ATGAGTATTCGGAATGATAATGCTTCCGGTGGCTATATGCA | 210 | aaatacaacaATGAGT | 994 | gacagtcctgTGACTT | 995 |
| | | | KRDRVEEEIKPLDDNHSKGAVAAD | | GCCGGATCAATCTTCGAAGGCTTCTATGCACAAAAGAGACT | | ATTCGGAATGATAA | | TCTTAGATGAACTT | |
| | | | GEVHLRKS | | TAAGAGTTGAGGAGGAAATAAAGCCATTGGATGATATGGAT | | | | | |
| | | | | | AGCAAGGGTGCTGTAGCAGCAGATGGTGAAGTTCATCTAAG | | | | | |
| | | | | | AAAGTCA | | | | | |
| 55 | YGR014w | MSB2 | MQFPFACLLSTLVISSSLARASPF | 10 | ARTGCAGTTTCCATTCGCTTGTCTCCTATCGACCCTTGTAA | 9 | aaatacaacaATGCAG | 996 | gacagtcctgTGACAC | 997 |
| | | | DFIFGRGTQQAWSQSESQGVSFTN | | TTAGTGGGTCATTGGCCCGGGCCAGCCCCTTCGACTTTATA | | TTTCCATTCGCT | | AGAAGTCTGGGAA | |
| | | | EASQDSSTTSLVTAYSQGVHSHQS | | TTCGGCAATGGAACGCAACAAGCTCAGAGCCAAAGCGAGAG | | | | | |
| | | | ATIVSATISSLPSTQVDASSTSQT | | TCAAGGTCAAGTTTCTTTCACCAATGAAGCTTCTCAGGATA | | | | | |
| | | | SVS | | GTTCCACCACCTCTTTGGTAACAGCCTATTCTCAAGGTGTT | | | | | |
| | | | | | CATTCGCACCAGTCTGCAACAATAGTGAGTGCCACAATCTC | | | | | |
| | | | | | TTCCCTCCCATCTACTTGGTASTGATGCGAGCTCCACTTCC | | | | | |
| | | | | | CAGACTTCTGTGTCA | | | | | |
| 56 | YGR032w | GSC2 | HSYNDPNLNGQYYSHGDGTGDGNY | 213 | ATGTCCTACAACGATCCAAACTTGAATGGACAGTATTACAG | 212 | aaatacaacaATGTCC | 998 | gacagtcctgTCCATC | 999 |
| | | | PTQVQDQSAYDEYGQPIYQNQLDD | | TAACGGTGATGGGACTGGTGACGTAATTACCCTACGTACCA | | TACAACGATCCAA | | TTGAGAAGACGG | |
| | | | GYYDPNEQYVDGTQFPQGQDPSQD | | AGTGACACAGGATCAAAGTGCGTACGATGAGTACGGTCAGC | | | | | |
| | | | QGPYNNDASYYNQPPKHNPSSQDS | | CAATCTATACACAAAACCAACTGGATGATGGTTATTATGAT | | | | | |
| | | | | | CCAAACGAACAATACGTTGACGGTACACAATTCCTCAGGGA | | | | | |
| | | | | | CAAGATCCTTCACAAGACCAAGGTCCTTATAATAACGATGC | | | | | |
| | | | | | TAGTTACTATAACCAACCCCCCAATATGATGAACCGTCTTC | | | | | |
| | | | | | TCAAGATGGA | | | | | |
| 57 | YGR055w | MUP1 | MSEGRTFLSQLNVFNKEHYQFSSS | 215 | ATGTCGGAAGGAAGAACGTTTCTGTCACAGTTGAATGTCTT | 214 | aaatacaacaATGTCG | 1000 | gacagtcctgCTGCTT | 1001 |
| | | | TTKKEVSHSTVDADHGASDFEAQQ | | CAACAAGGAGAACTATCAATTTTCTTCTTCTACTACAAAAA | | GAAGGAAGAACGT | | TTCACCTTGGTC | |
| | | | FATELDQGEKQ | | AAGAAGTAAGTAACTCGACAGTGGATGCTGACAACGGTGCC | | | | | |
| | | | | | TCCGATTTTGAGGCAGGCCAGCAATTTGCTACAGAATTGGA | | | | | |
| | | | | | CCAAGGTGAAAAGCAG | | | | | |
| 58 | YGR121c | MEP1 | HESRTTGPLITETYDGPVAFHILG | 217 | ATGGAGAGTCGAACTACAGGGCCTTTAACGACTGAAACCTA | 216 | aaactcccacaATGGA | 1002 | gacagtcctgTGCAGA | 1003 |
| | | | AALVFFHVPGLGFLYSGLARRKSA | | CATGGCCCCACTGTGGCCTTGATGATATTAGGTGCCGCCCT | | GAGTCGAACTACAGG | | CTTCCTTCTTGC | |
| | | | | | AGTATTTTTTTTATGGTGCCCGGATTGGGATTCTTGTACTC | | | | | |
| | | | | | CGATTGGCAAGAAGGAAGTCTGCA | | | | | |
| 59 | YGR191w | HIP1 | HPRHPLKKEYRADVVDGFKPATSP | 219 | ATGCCTAGAAACCCATTGAAAAAGGAATATTGGGCAGATGT | 218 | aaatacaaacaATGCC | 1004 | gacagtcctgGGATAG | 1005 |
| | | | AFEHEKESTTFVTELTSKTDSAFP | | AGTTGACGGATTCAAGCCGGCTACTTCTCCAGCCTTCAGAG | | TAGAAACCCATTG | | ATCTTTACTCAGGT | |
| | | | LSSKDSPGINQTTNDITSSDRFRR | | AATGAAAAAGAATCTACTACATTTGTTACCGAACTAACTTC | | | | | |
| | | | NEDYEQEDINNTKLSKDLS | | CAAAACCGATTCTGCATTTCCATTAAGTAGCAAGGATTCAC | | | | | |
| | | | | | CTGGCATAAACCAAACCACAAACGATATTACCTCTTCAGAT | | | | | |
| | | | | | CGCTTCCGTCGTAATGAAGACACAGAGCAGGAAGACATCAA | | | | | |
| | | | | | CAAGACCAACCTGAGTAAAGATCTATCC | | | | | |
| 60 | YGR281w | YOR1 | MTITVSDAVSETELENKSQVVVLS | 221 | ATGACGATTACCGTGGGGGATGCAGTTTCCGAGACGGAGCT | 220 | aaatacaacaATGACG | 1006 | gacagtcctgTTGTGG | 1007 |
| | | | PKASASSDISTDVKDTSSSWDDKS | | GGAAAACAAAAGTCAAAACGTGGTACTATCTCCCAAGGCAT | | ATTACCGTGGG | | TACTTCTGGAATTT | |
| | | | LLPTGEYIVDRNKPQTYLNSDDIE | | CTGCTTCTTCAGACATAAGCACAGATGTTGATAAGGACACA | | | | | |
| | | | XVTESDIFPQXRLFSFLHSKKIPE | | TCGTCTTCTTGGGATGACAAATCTTTGCTGCCTACAGGTGA | | | | | |
| | | | VPQ | | ATATATTGTGGACAGAAATAAGCCCCAAACCTACTTGAATA | | | | | |
| | | | | | GCGATGATATCGAAAAAGTGACAGAATCTGATATTTTCCCT | | | | | |
| | | | | | CAGAAACGTCTGTTTTCATTCTTGCACTCTAAGAAAATTCC | | | | | |
| | | | | | AGAAGTACCACAA | | | | | |
| 61 | YHL016c | DUR3 | MGEFKPPLPQGAGYAIVLGLGAVF | 223 | ATGGGAGAATTTAAACCTCCGCTACCTCAAGGCGCTGGGTA | 222 | acatacaacaATTGGA | 1008 | gacagtcctgTACAGA | 1009 |
| | | | AGHHVLTTYLLKRYQKEIITAEEF | | CGCTATTGTATTGGGCCTATTTGCAGGAATGATGGTTTTGA | | GAATTTAAACCTCC | | TCTACCGGCGGT | |
| | | | TTAGRSV | | CCACTTATTTACTGAAACGTTATCAAAAGGAAATCATCACA | | | | | |
| | | | | | GCAGAAGAATTCACCACCGCCGGTAGTCTGTA | | | | | |
| 62 | YHL036w | MUP3 | MEPLLFNSGKAHPSQDVFIDVEVD | 225 | ATGGAACCGCTGCTTTTTAATAGTGGGAAAGCAAATCCCTC | 224 | aaatacaacaATGGAA | 1010 | gacagtcctgTCTTCC | 1011 |
| | | | GITTKYGSTNTGSFSSHDTVEAQI | | TCAAGATGTTTTCATGAGTGTGGAAGTTGGTGATATTACCA | | CCGCTGCTTTT | | CTGTGGAAACTTC | |
| | | | KAETARFHEVPQGR | | CAAAATATGGTTCCACAAATACTGGATCATTCAGTTCGATG | | | | | |
| | | | | | GATACTGTGGAAGCGCAGGCGATAAAGGCAGAGACGGCAAG | | | | | |
| | | | | | ATTCATGGAAGTTCCACAGGGAAGA | | | | | |
| 63 | YHR092c | HXT4 | HSEEAAYQEDTAVQNTPADALSPV | 227 | ATGTCTGAAGAAGCTGCCTATCAAGAGGATACAGCAGTCCA | 226 | aaatccaacaATGTCT | 1012 | gacagtcctgGGGCTT | 1013 |
| | | | ESDSNSALSTPSKKAERDDKHDFD | | AAATACTCCAGCTGATGCTTTGTCGCCAGTTGAATCCGATT | | GAAGAAGCTGCCTA | | CTTTGGAATTTC | |
| | | | ENHEESKRYVEIPKKP | | CTAATTCCGCTTTGTCTACTCCATCCAACAAAGCTGAAAGA | | | | | |
| | | | | | GATGACATGAAAGATTTCGACGAGAATCACGAAGAATCTAA | | | | | |
| | | | | | TAACTACGTTGAAATTCCAAAGAAGCCC | | | | | |
| 64 | YHR094c | HXT1 | HNSTPDLISQXSNSSNYELESGRS | 229 | ATGAATTCAACTCCCGATCTAATATCTCCTCAGAAATCCAA | 228 | acatacaacaATGAAT | 1014 | gacagtcctgTCCGGT | 1015 |
| | | | KAKNTPEGKNESFHDMLSESQVQP | | TTCATCCAACTCATATGAATTGGAATCTGGTCGTTCAAAGG | | TCAACTCCCGATCT | | GTTTGGAGGGG | |
| | | | AVAPPNTG | | CCATGAATACTCCAGAAGGTAAAAATGAAAGTTTTCACGAC | | | | | |
| | | | | | AACTTAAGTGAAAGTCAAGTGCAACCCGCCGTTGCCCCTCC | | | | | |
| | | | | | AAACACCGGA | | | | | |
| 65 | YHR096c | HXT5 | HSELENAHQGPLEGSATVSTNSNS | 231 | ATGTCGGAACTTGAAAAGCGCTCATCAAGGCCCCTTGGAAG | 230 | aaatacaacaATGTCG | 1016 | gacagtcctgCGATTT | 1017 |
| | | | YNEKSGNSTAPGTAGYRDKLAGAK | | GGTCTGCTACTGTGAGCAAATTCTAACTCATACAACGAGAA | | GAACTTGAAAACG | | CTTCTCTAGTTTGTT | |
| | | | VSSYISHEGPPKDELEELQKEVDK | | GTCAGGAAACTCGACTGCTCCTGGTACCGCCGGTTACAACG | | | | | |
| | | | QLEKKS | | ATAATTGGCACAAGCTAAACCCGTCTCAAGTTACATTTCCC | | | | | |
| | | | | | ATGAAGGCCCTCCCAAAGACAACTGGAAGAGCTTCAGAAGG | | | | | |
| | | | | | AGGTTGACAAACAACTAGAGAAGAAATCG | | | | | |
| 66 | YIL013c | PDR11 | HSLSKVFNPIPDASVTFDGATVQL | 233 | ATGTCTCTTTCCAAATATTTTAATCCAATTCCTGACGCTTC | 232 | aaatacaacaATGTCT | 1018 | gacagtcctgCTGTTT | 1019 |
| | | | EESLGAVNDEESASEFKNVGHLEI | | AGTCACCTTTGATGGGGCTACCGTTCAATTGGAAGAATCCC | | CTTTCCAAATATTT | | GTACTCATTGTCTT | |
| | | | SDITFRANEGEVVLVLGNPTSALF | | TCGGTGCTGTTCAGAACGATGAAGAGTCCGCATCGGAATTC | | | | | |
| | | | KGLGHGHKHLKYSPEGSIRFKDNE | | AAAAACGTAGGCCATTTAGAAATTAGTGATATCACTTTTCG | | | | | |
| | | | YKQ | | TGCTAATGAAGGTGAAGTCGTCTTAGTACTGGAAACCCAAC | | | | | |
| | | | | | ATCAGCGCTCTTCAAAGGTCTATTCCATGGTCACAAGCATC | | | | | |
| | | | | | TGAAATACTCGCCTGAAGGGTCTATTAGATTCAAAGACAAT | | | | | |
| | | | | | GAGTACAAACAG | | | | | |
| 67 | YIL047c | SYG1 | KXFADHLTESAIPWRDKIDYKVGK | 235 | ATGAAGTTTGCTGACCATCTAACCGAGTCTGCCATCCCGGA | 234 | aaatacaacaATGAAG | 1020 | gacagtcctgCAACCA | 1021 |
| | | | KKLRRKEKLDAEEEQSSSYRSWHP | | ATGGAGGGACAAATATATTGATTATAAGGTCGGCAAGAAGA | | TTTGCTGACCATC | | GTCTTCAATGAAGT | |
| | | | SVSVQTAFQQREPGKSRSDGDYRS | | AGCTTCGCCGCTACAAGGAGAAGCTGGATGCCGAAGAAGAG | | | | | |
| | | | GPAFKKDYSALQREFVADFIEDWL | | CAATCCAGCTCCTACCGGAGCTGGATGCCCTCTGTGTCGGT | | | | | |
| | | | | | ATACCAGACTGCATTTCAGCAGAGAGCCCGGCAAAAGTCGC | | | | | |
| | | | | | AGCGACGGGACTATCGCTCCGGACTTGCGTTCAAGAAAGGA | | | | | |
| | | | | | CTATTCTGCTTTGCAGAGGGAGTTCGTTGCTGACTTCATTG | | | | | |
| | | | | | AAGACTGGTTG | | | | | |
| 68 | YIL140w | AXL2 | NTQLQISLLLTATISLLHLVVATP | 86 | ATGACACAGCTTCAGATTTCATTATTGCTGACAGCTACTAT | 85 | aatacaacaATGACAC | 1022 | gacagtcctgATACAA | 1023 |
| | | | YEAYPIGKQYPPARVNESFTFQIS | | ATCACTACTCCATCTAGTAGTGGCCACGCCCTATGAGGCAT | | AGCTTCAGATTTC | | CGTGGTGTTCGCAT | |
| | | | WDTYKSSVDKTAQITYNCFDLPSW | | ATCCTATCGGAAAACAATACCCCCCAGTGGCAAGAGTCAAT | | | | | |
| | | | LSFDSSSRTFSGEPSSDLLSDANT | | GAATCGTTTACATTTCAAATTTCCAATGATACCTATAAATC | | | | | |
| | | | TLY | | GTCTGTAGACAAGACAGCTCAAATAACATACAATTGCTTGA | | | | | |
| | | | | | CTTACCGAGCTGGCTTTCGTTTGACTCTAGTTCTAGAACGT | | | | | |
| | | | | | TCTCAGGTGAACCTTCTTCTGACTTACTATCTGATGCGAAC | | | | | |
| | | | | | ACCACGTTGTAT | | | | | |
| 69 | YIL147c | SLN1 | MRFGLPSKLELTPPFRIGIRTQLT | 237 | ATGCGATTTGGCCTGCCATCAAATTGGAACTCACTCCTCCG | 236 | aaatacaacaATGCGA | 1024 | gacagtcctgGTTACC | 1025 |
| | | | ALVSIVALGSLIILAVTTGVYFTS | | TTTAGGATAGGCATCCGAACTCAACTAACGGCACTAGTTAG | | TTTGGCCTGCC | | TGCAACGTAACTTG | |
| | | | NYKHLRSDRLYIAAGLKSSQIDQT | | TATAGTGGCTTTGGCTCACTGATTATTCTGGCTGTAACGAC | | | | | |
| | | | LNYLYQAYYLASRDALQSSLTSYV | | AGGGGTCTATTTTACCTCGAACTATAAAAATTTAAGGTCCG | | | | | |
| | | | AGN | | ATAGACTGTACATTGCCGCTCAGTTAAAGTCATCACAGATT | | | | | |
| | | | | | GACCAAACTCTAAACTACTTATATTACCAGGCGTACTATTT | | | | | |
| | | | | | GGCATCAAGAGACGCCCTGCAAAGCTCACTAACAAGTTACG | | | | | |
| | | | | | TTGCAGGTAAC | | | | | |
| 70 | YIL170w | HXT12 | MGLIVSIFNIGCAIGGIVLSKVGD | 239 | ATGGGTTTGATTGTCTCAATATTCAACATTGGCTGCGCCAT | 238 | aaatacaacaATGGGT | 1026 | gacagtcctgTGTAAT | 1027 |
| | | | IYGRRIGLIY | | AGGCGGAATTGTCTTGTCAAAAGTCGGTGATATATATGGTC | | TTGATTGTCTCA | | CAATCCAATACGAC | |
| | | | | | GTCGTATTGGATTGATTACA | | | | | |
| 331 | YJR118c | ILM1 | HAQALNSTNIAFFVAFLFTIAFFC | 90 | AATGGCTCAAGCCTTGAACTCCACCAATATTGCTTTTTTTC | 89 | aaatacaacaATGGCT | 1548 | gacagtcctgACGTGA | 1549 |
| | | | LKNVNSILQRTVFIVLTQANKLPQ | | AGAGTAGCATTTTTATTCACGATCGCCTTCTTTTGTTTAAA | | CAAGCCTTGAACT | | CAGTGTTAACTGCG | |
| | | | LTLSR | | GAACGTTAATTCTATTTTGCAAAATACATATTTCATAGTCT | | | | | |
| | | | | | TAACGCAAGCGATGAATTTACCGCAGTTAACACTGTCACGT | | | | | |
| 332 | YKL065a | YET1 | MSLYFTTLFLLLVEVVKLFIFVLP | 731 | ATGAGTTTATACTTTAGACATTATTTTTATTGCTCACTGTT | 730 | aaatacaacaATGAGT | 1550 | gacgtcctgCTTCGCT | 1551 |
| | | | LPFRIRRGIFSTYMQLTAK | | GAGGTGGTAATGCTCTTCATCTTCGTTTTGCCTTTGCCATT | | TTATACTTTACGAC | | GTCAATTGGTTAT | |
| | | | | | CCGGATCCGTAGGGGGTATTTTTTAGCACCTATAACCAATT | | | | | |
| | | | | | GACAGCGAAG | | | | | |
| 333 | YLR034c | SMF3 | YRSYMQILQXFAKFIGPGILVSVA | 733 | ATGCGATCTTATATGCAGATTCTTCAAAAATTTGCCAAATT | 732 | aaatacaacaATGCGA | 1552 | gacagtcctgATATTG | 1553 |
| | | | YMDPGNYATSVSGGAQYKY | | TATTGGGCCAGGGATATTAGTCAGTGTGGCTTATATGGACC | | TCTTATATGCAGAT | | TATTGAGCACCAC | |
| | | | | | CAGGAAATTATGCCACTAGTGTTTCCGTGGTGCTCAATACA | | | | | |
| | | | | | AATAT | | | | | |
| 334 | YLR050c | | KKLGHREQQFYLVVFIVHIPITIF | 735 | ATGAAGCTAGGACATCGTGAGCAACAATTCTACTTGTGGTA | 734 | aaatacaacaATGAAG | 1554 | gacagtcctgTTCTGG | 1555 |
| | | | IDSSVVIPAKWQLGIAQKVVSDHI | | CTTGATCGTTCACATTCCCATCACCATATTCATCGACTCAT | | CTAGGACATCGTGA | | TTTCTCTGATAGCA | |
| | | | AKQHDFLLSEKPE | | CAGTGGTTATTCCCGCTAAATGGCAACTAGGGATTGCGCAA | | | | | |
| | | | | | AAGGTTGTTAGTGATCACATCGCAAAGCAACACGATTTCCT | | | | | |
| | | | | | GCTATCAGAGAAACCAGAA | | | | | |
| 335 | YLR207w | HRD3 | HITLLLYLCVICHAIVLIRADSIA | 737 | ATGATAACACTCTTATTATACCTGTGCTAATATGTAACGCA | 736 | gcatacaacaATGATA | 1556 | gacagtcctgGAATTG | 1557 |
| | | | DPWPEARHLLNTIAKSRDPKXEAA | | ATAGTGTTAATAAGGGCTGATTCGATAGCGGACCCTTGGCC | | ACACTCTTATTATA | | TTCACTTGATTGTA | |
| | | | NEPHADEFVGFYVPHDYSPRNEEK | | TGAAGCGCGACATCTACTAAATACCATAGCTAAGTCCAGAG | | | | | |
| | | | NYQSIGNNEITDSQRHIYELLVQS | | ACCCAATGAAAGAAGCTGCTATGGAACCCAATGCAGATGAA | | | | | |
| | | | SEQF | | TTTGTTGGATTCTATGTACCGATGGATTATTCCCCACGTAA | | | | | |
| | | | | | TGAGGAAAAAAAACTACCAGAGCATTGGCAAACGAAATCAC | | | | | |
| | | | | | AGATTCTCAACGTCATATTTATGAATTACTTGTACAATCAA | | | | | |
| | | | | | GTGAACAATTC | | | | | |
| 336 | YLR220w | CCC1 | HSIVALKNAVVTLIQKAKGSGGTS | 739 | ATGTCCATTGTAGCACTAAAGAACGCAGTGGTGACCCTTAT | 738 | aaatacaacaATGTCC | 1558 | gacagtcctgTACGCG | 1559 |
| | | | ELGQSESTPLLRGSHSHSSRHDKL | | ACAGAAAGCGAAAGGTAGTGGTGGAACCTCAGAGTTGGGGG | | ATTGTAGCACTAAA | | AGGATCTACTGATT | |
| | | | SSSSSDIIYGRNSAQDLENSPHSV | | GGTCTGAATCAACTCCTTGTTGAGGGGTAGTAATAGCAATA | | | | | |
| | | | GHDKRNGDHDSDKEKANLGFFQSV | | GTTCAAGGCATGATAACTTATCCTCATGTAGCTCGGATATT | | | | | |
| | | | DPRV | | ATCTATGGTAGAAATTCAGCGCAGGATCTAGAAAACTCACC | | | | | |
| | | | | | GATGTCAGTAGGGAAAGATAATAGGAATGGCGATAACGGTT | | | | | |
| | | | | | CGGATAACGAAAAGGCGAACCTAGGGTTCTTCCAATCAGTA | | | | | |
| | | | | | GATCCTCGCGTA | | | | | |
| 337 | YML012w | ERV25 | HQVLQLDLTTLISLVVAVDGLHFD | 741 | ATGCAGGTGTTACAGTTATGGTTGACAACTTGATCTCTTGG | 740 | aaatacacaATGCAGG | 1560 | gacagtcctgAAAACA | 1561 |
| | | | IAASTDPEQVCIRDFVTEGQLVVA | | TGGTGGCAGTGCAGGGATTACATTTCGACATTGCAGCATCT | | TGTTACAGTTATG | | AACGTCGAATGCC | |
| | | | DIHSDGSVGDGQKLFVRDSVGNEY | | ACAGATCCAGAACAGGTTTGTATTCGTGATTTTGTCACTGA | | | | | |
| | | | RRKRDFAGDVRVAFTAPSSTAFDV | | AGGTCAATTGGTTGTCGCGGATATTCACTCAGATGGTTCTG | | | | | |
| | | | CF | | TTGGTCATGGACAGAAACTAAACCTCTTCGTGCGTGATTCA | | | | | |
| | | | | | GTTGGAAACGAGTATCGTAGAAAGAGGGACTTTGCAGGCGA | | | | | |
| | | | | | CGTTCGTGTTGCGTTTACTGCTCCATCCTCCACGGCATTCG | | | | | |
| | | | | | ACGTTTGTTTT | | | | | |
| 338 | YMR149w | SWP1 | MQFFKTLAALVSCISFVLAYVADD | 743 | ATGCAATTCTTCAAAACACTTGCGGCCTTGGTGTCGTGCAT | 742 | aactacaacaATGCAA | 1562 | gacagtcctgAATTCG | 1563 |
| | | | VHVSFPSTAGKSRVWIGKVERPRI | | ATCGTTCGTCCTCGCTTACGTGGCACAAGATGTTCATGTAT | | TTCTTCAAAACACT | | GGTTCAAAAGCCA | |
| | | | GIDETVPTTITVEDPKEVIQVNHA | | CATTCCCCTCCACCGCAGGAAAGTCTAGGGTAATGATCGGG | | | | | |
| | | | IESTKXPFWSTLLIGLPKKLENAF | | TAAAGTTGAACCCAGAATAGGAATCGATGAAACTGTTCCGA | | | | | |
| | | | EPEI | | CTACAATCACAGTTGAAGACCCTAACGAGGTGATCAAGTAA | | | | | |
| | | | | | ATTTCGCCATTGAGTCTACCAACAAACCCTTCCAGAACACC | | | | | |
| | | | | | TTATTGATAGGCTTACCTAATAAGAACCTAGAAATGGCTTT | | | | | |
| | | | | | TGAACCCGAAATT | | | | | |
| 339 | YMR171c | | MSFKFLIESLLLGSISSQIRCGRS | 745 | ATGTCATTCAAGTTTCTGATAGAATCGCTGCTTCTCGGTTC | 744 | aaatacaacaATGTCA | 1564 | gccagtcctgATCCAT | 1565 |
| | | | SVIPRGDVSYGGDDTDELNND | | GATAAGCGGACAAATACGGTGTGGTAGATCTTCGGTGATCC | | TTCAAGTTTCTGAT | | GTTAAGTTCGTCAG | |
| | | | | | CCCGTGGCGATGTATCTTATGGGGGAGACGATACTGACGAA | | | | | |
| | | | | | CTTAACATGGAT | | | | | |
| 340 | YMR200w | ROT1 | MZKSKKFTLKKLILGGYLFAQXVY | 44 | ATGTGGTCGAAAAAGTTTACATTAAAAAAGCTAATCTTAGG | 43 | acctacaacaATGTGG | 1566 | gacagtcctgACCATG | 1567 |
| | | | CEDESHSIYGTWSSKSHQVFTGPG | | CGGGTATTTGTTGCTCAAAAGGTCTATTGTGAAGACGAAAG | | TCGAAAAAGTTTAC | | CTGATAAATCAACG | |
| | | | FYDPVDELLIEPSLPGLSYSFTED | | TAACTCTATATACGGTACCTGGTCATCTAAATCAAATCAAG | | | | | |
| | | | GWYEEATQVSGMPRNPTGPHASLI | | TGTTCACGGGACCGGGGTTTTATGATCCCGTAGATGAACTA | | | | | |
| | | | YQHG | | TTGATAGAACCTTCATTGCCCGGGCTTAGCTATTCGTTCAC | | | | | |
| | | | | | TGAAGATGGTTGGTACGAAGAAGCTACTTACCAGGTAAGTG | | | | | |
| | | | | | GAAATCCTCGTAACCCAACTTGCCCCATGGCTTCGTTGATT | | | | | |
| | | | | | TATCAGCATGGT | | | | | |
| 341 | YMR238w | DFG5 | HIVHISAKHILSICFTFLSFFKAT | 747 | ATGATCGTCAATATTAGTGCGAAGATGATCTTATCGATATG | 746 | aaatacacaATGATCG | 1568 | gacagtcctgTAGTGC | 1659 |
| | | | HAKDLDTTSKTSICDATALIQGGW | | CTTTACGTTTCTGTCATTTTTTAAAGCCACTCATGCCATGG | | TCAATATTAGTGC | | ATCGTATAGTAATT | |
| | | | LDYYEGTRYGGTVGNFQSPYWWHA | | ATTTGGATACTACTAGCAAAAACGTCAATTTGTGATGCGAC | | | | | |
| | | | GEAFGGHLEKKFLCENDTYQELLY | | AGCGTTAATTCAAGGTGGTATGCTGGATTACTATGAGGGTA | | | | | |
| | | | DAL | | CTAGATACGGTGGTACCGTTGGGATGTTTCAGTCACCATAC | | | | | |
| | | | | | TATTGGTGGCATGCAGGGGAAGCATTTGGTGGCATGTTGGA | | | | | |
| | | | | | AAAATTGGTTTCTTTGTGAGAATGATACATATCAAGAATTA | | | | | |
| | | | | | CTATACGATGCACTA | | | | | |
| 342 | YMR274c | RCE1 | CLQFSTFLVLLYSISIYVLPLYAT | 749 | ATGCTACAAATTCTCAACATTTCTAGTGCTCCTATACATCT | 748 | aaatacaacaATGCTA | 1570 | gacagtcctgGCGAGA | 1571 |
| | | | SQPEGSKKRDWPRTIKSR | | CCATATCCTATGTGCTACCGCTATATGCAACTTCACAACCA | | CAATTCTCAACATT | | TTTAATCGTTCGGAG | |
| | | | | | GAAGGGTCTAAACGAGATAATCCTCGAACGATTAAATCTCG | | | | | |
| | | | | | C | | | | | |
| 343 | YNR021w | | HSSSIQPLTGFLERVNSLHAPYQA | 751 | ATGTCTAGTTCAATATTGGCCCACTTACGGGTTTTTTGGAG | 750 | aaatacaacaATGTCT | 1572 | gaccgtcctgTTTGAC | 1573 |
| | | | LSYDEQKANTIKKRVK | | CGTGTCAATTCACTCAATGCGCCCTACCAAGCATTATCATA | | AGTTCAATATTTGG | | TCTTTGCCAAATAG | |
| | | | | | TGACGAACAAAAGGCCATGACTATTTGGCAAAGAGTCAAA | | | | | |
| 344 | YNR030w | ECM39 | HKQSVLDTVLLTVISFHLIQAPFT | 753 | ATGCGTTGGTCTGTCCTTGATACAGTCTATTGACCGTGATT | 752 | aaatacaacaATGCGT | 1574 | gccagtcctgTGTTCT | 1575 |
| | | | KVEESFNIQAIDHILTYSVFDISQ | | TCCTTTCATCTAATCCAAGCTCCATTCACCAAGGTGGAAGA | | TGGTCTGTCCTTGG | | AGGGACTACTCCAG | |
| | | | YDHLKFPGVVPRT | | GAGTTTTAATATTCAAGCCATTCATGATATTTTAACCTACA | | | | | |
| | | | | | GCGTATTTGATATCTCCAATATGACCACTTGAAATTTCCTG | | | | | |
| | | | | | GAGTAGTCCCTAGAACA | | | | | |
| 345 | YOL013c | HRD1 | WVPENKKRKQLAIFVVVTVLLTFY | 755 | ATGGTGCCAGAAAATAGAAGGAAACAGTTGGCAATTTTTGT | 754 | aaatacacaATGGTGC | 1576 | gccagtcctgGCCTTC | 1577 |
| | | | CYYSATKSYSVSFLQVTLKLWEG | | AGTTGTCACATATTGCTCACATTTATGCGTGTATTCAGCCA | | CAGAAAAATAGAAG | | ATTTAGCTTCAGTG | |
| | | | | | CCAAGACAAGCGTTTCCTTTTTGCAAGTAACACTGAAGCTA | | | | | |
| | | | | | AATGAAGGC | | | | | |
| 346 | YOR016c | ERP4 | KRYFTLIAILFSSSLLTHAFSSNY | 757 | ATGCGCGTTTTTACTTTGATTGCGATTTTGTTTAGTTCATC | 756 | aactacaacaATGCGC | 1578 | gaccgtcctgACAGAA | 1579 |
| | | | APVGISLPAFIKEGLYYDLSSDXD | | TTTGTTAACACATGCATTCTCCTCTAATTATGCTGCTGTAG | | GTTTTTACTTTGAT | | GTGTACTTACCTA | |
| | | | VLVVSYQVLTGGFFEDIFITAPDG | | GCATATCATTACCTGCTTACCAAAGAATGTCTTTACTATGA | | | | | |
| | | | SVIVERQKKHSDFLLKSFSIGXYT | | TTTATCCTCTGATAAAGATGTCCTTGTGGTCAGTTACCAAG | | | | | |
| | | | FC | | TTTGACAGGTGGGAATTTCGAGATAGACTTCGATATTACCG | | | | | |
| | | | | | CCCCTGATGGCTCTGTTATCGTCACTGAAAGACAAAAGAAG | | | | | |
| | | | | | CATTCTGATTTTCTACTGAAGTCGTTTGGTATAGGTAAGTA | | | | | |
| | | | | | CACTTTCTGT | | | | | |
| 347 | YOR085w | OST3 | KKLFLVSLVFFCGVSTHPALAHSS | 759 | ATGAATTGGCTGTTTTGGTCTCGCTGGTTTTCTTCTGCGGC | 758 | aaatacaacaATGAAT | 1580 | gacagtcctgGGACGA | 1581 |
| | | | SDRLLKLANKSPKKIIPLKDSSFE | | GTGTCAACCCATCCTGCCCTGGCAATGTCCAGCAACAGACT | | TGGCTGTTTTTGGT | | TTTTGCATCCG | |
| | | | NILAPPHENAYIVALFTATAPEIG | | ACTAAAGCTGGCTAATAAATCTCCCAAGAAAATTATACCTC | | | | | |
| | | | CSLCLELESEYDTIVASRHDNNPD | | TGAAGGACTGAAGTTTTGAAAACATCTTGGCACCACCTCAG | | | | | |
| | | | AKSS | | GAAAATGCCTATATAGTTGCTCTGTTTACTGCCCACAGCGC | | | | | |
| | | | | | CCGAAATTGGCTGTTCTCTGTGTCTCGAGCTAGGATCCGAA | | | | | |
| | | | | | TACGACACCATAGTGGCCTCCTGGTTTGATGATGATCCGGA | | | | | |
| | | | | | TGCAAAATCGTCC | | | | | |
| 422 | YCL043c | PDI1 | MKFSAGAYLSWSSLLLASSVFAQQ | 24 | ATGAAGTTTCTGCTGGTGCCGTCCTGTCATGGTCCTCCCTG | 23 | aaatacaacaATGAAG | 1730 | gacagtcctgGTCGTG | 1731 |
| | | | EAVAPEDSAVVKLATDSFNEYIQS | | CTGCTCGCCTCCTCTGTTTCGCCCAACAAGAGGCTGTGGCC | | TTTTCTGCTGGTGC | | CGACTGAATGTACT | |
| | | | HD | | CCTGAAGACTCCGCTGTCGTTAAGTTGGCCACCGACTCCTC | | | | | |
| | | | | | AATGAGTACATTCAGTCGCACGAC | | | | | |
| 423 | YCR069w | CPR4 | MVLKSLLLVLYSLVLCQVHAAPSS | 863 | ATGTGGTTGAAATCCTTGCTGCTCTGCCTGTACTCCTTAGT | 862 | aaatacacaATGTGGT | 1732 | gacagtcctgAGTACC | 1733 |
| | | | SKQITSKDVDLQKKYEPSPPATHR | | ACTCTGCCAAGTCCACGCTGCACCTTCATCAGGGAAAGCAG | | TGAAATCCTTGCT | | GTACAACTCAAAAG | |
| | | | GIITIEYFDPVSKSHKEADLTFEL | | ATTACCTCCAAGGATGTTAGATCTTCAGAAAAAATATGAGC | | | | | |
| | | | YGT | | CCAGTCCCCCGCCACACATCGTGGAATAATCACTATCGAAT | | | | | |
| | | | | | ACTTTGATCCGTTTCGAAGTCATGAAAGAGGGCGGATCTGA | | | | | |
| | | | | | CTTTTGAGTTGTACGGTACT | | | | | |
| 424 | YDL052c | SLC1 | MSVIGRFLYYLRSVLVLLALAGCG | 865 | ATGAGTGTGATAGGTAGGTTCTTGTATTACTTGAGGTCCGT | 864 | aaatacaacaATGAGT | 1734 | gacagtcctgACAACA | 1735 |
| | | | FYGVIASILCTLIGHQHLAQWITA | | GTTGGTCGTACTGGCGCTTGCAGGCTGTGGCTTTTACGGTG | | GTATAGGTAGGTT | | GCGCAGTAATCCA | |
| | | | RC | | TAATCGCCTCTATCCTTTGCACGTTAATCGGTAAGCAACAT | | | | | |
| | | | | | TTGGCTCAGTGATTACTGCGCGTTGT | | | | | |
| 425 | YRD032c | PST2 | MPHVAIIIYTLGHVAATAEKEKKG | 867 | ATGCCAAGAGTAGCTATCATCATTTACACACTATATGGTCA | 866 | aaatacaacaATGCCA | 1736 | gacagtcctgATCATA | 1737 |
| | | | IEAAGGSADIYQVEETLSPEVVKA | | CGTTGCTGCCACCGCAGAGGCAGAAAAGAAGGGAATTGAAG | | AGAGTAGCTATCAT | | TTCTGTCAACGTAT | |
| | | | LGGAPKDYPIATQDTLTEYD | | CCGCTGGAGGCTCTGCAGACATTTATCAAGTCGAGGAAACG | | | | | |
| | | | | | TTGTCTCCAGAAGTTGTTAAGGCGCTTGGCGGTGCTCCAAA | | | | | |
| | | | | | GCCAGATTACCCAATTGCCACTCAAGATACGTTGACAGAAT | | | | | |
| | | | | | ATGAT | | | | | |
| 426 | YDR056c | | MLVRLLRVILLASMVFCADILQLS | 56 | ATGCTTGTGCGGCTGTTGCGTGTGATTTATTGGCCAGCATG | 55 | aaatacaacaATGCTT | 1738 | gacagtcctgTTCAAT | 1739 |
| | | | YSDDAKDAIPLGTFEIDSTSDGHV | | GTTTTCTGTGCTGATATTTTACAATTAAGCTATTCAGATGA | | GTGCGGCTGTT | | CTGGGCATTCAAAC | |
| | | | IVTTNVIQDVEVSGEYCLNAQIE | | TGCGAAAGACGCTATACCCTAGGAACATTTGAGATTGATAG | | | | | |
| | | | | | TACATCCGATGGGAATGTTACAGTAACAACGTTAATATACA | | | | | |
| | | | | | GGATGTTGAAGTTTCTGGAGAATACTGTTTGAATGCCCAGA | | | | | |
| | | | | | TTGAA | | | | | |
| 427 | YDR057w | YOS9 | MQAKIIYALSAISALIPLGSSLLA | 62 | ATGCAAGCTAAAATTATATATGCTCTGAGCGCAATTTCTGC | 61 | aaatacaacaATGCAA | 1740 | gacagtcctgATATCC | 1741 |
| | | | PIEDPIVSHKYLISYIDEDDWSDR | | GTTGATTCCGTTAGGATCATCACTATTAGCACCTATAGAAG | | GCTAAAATTATAT | | CGAGTTCATGACAG | |
| | | | ILQWQSVRRSGY | | ACCCCATAGTATCGAATAAGTACCTCATATCTTACATCGAT | | | | | |
| | | | | | GAGGACGACTGGAGTGATAGGATATTACAAAATCAGTCTGT | | | | | |
| | | | | | CATGAACTCGGGATAT | | | | | |
| 428 | YDR196c | | MLVVGLTGGICGKSTVSRRLRDXY | 869 | ATGCTGGTAGTGGGATTGACAGGTGGGATCGCTTGTGGTAA | 868 | aactacaacaATGCTG | 1742 | gacgtcctgTTTGTCC | 1743 |
| | | | KLPIVADKIARQVVEPGQNAYDQI | | GAGCACAGTGTCGAGAAGACTCAGAGACAAATACAAACTAC | | GTAGTGGGATTGA | | TTGAAGTATAACA | |
| | | | VLYFXDK | | CCATTGTTGATGCGGACAAGATTGCTAGACAAGTGGTCGAA | | | | | |
| | | | | | CCAGGACAGAATGCTTATGATCAAATTGTGTTATACTTCAA | | | | | |
| | | | | | GGACAAA | | | | | |
| 429 | YDR221w | | MVSRFSLFLLLIEQSPLVASLQQS | 871 | ATGGTGAGCATGTTCTCATTATTTCTGCTATTAATTGAGCA | 870 | aaatacaacaATGGTA | 1744 | gacagtcctgCTCATC | 1745 |
| | | | QRHIVGVPWEKQHLYDSREPDLTK | | ATCGCCGCTTGTAGGGTCATTGCAACAAAGTCAACGGCATA | | GCATGTTCTCATT | | TGAACCATCAGGAC | |
| | | | KHCLMHEDIVLDISQINDGVCDCP | | TAGTGGGTGTTCCCTGGGAAAAGCAGCACTTGTATGACTCG | | | | | |
| | | | DGSDE | | AATGAACCAGATTTGACTAAATGGCACTGTTTGAACCACGA | | | | | |
| | | | | | AGATATCGTATTGGATATAAGCCAGATTAATGATGGGTTTG | | | | | |
| | | | | | TGATTGTGCTGATGGTTCAGATGAG | | | | | |
| 430 | YDR245w | MNN10 | MSSVPUNSQLPISHKHLEYDEDEK | 873 | ATGTDCTAGTGTACCTTATAATTCCCAACTTCCTATATCCA | 872 | aatacaacaATGTCAG | 1746 | gacagtcctgGGAGTT | 1747 |
| | | | KSRGSKLGLKYKNIYKRKTLCSSL | | ACCATCTAGAGTACGATGAAGATGAAAAGAAGAGCAGAGGC | | TGTACCTTATAA | | GATGCTAGAACCAG | |
| | | | ARWRKLILLISLALFLFIWISDST | | TCAAAACTAGGCCTGAAATATAAAATGATATACTGGAAAAC | | | | | |
| | | | ISRNPSTTISFOGCNSNDKKLSNT | | TTTATGCAGTTCGCTAGCGAGATGGAGAAAGCATAATACTA | | | | | |
| | | | GSSIKS | | TTAATATCTTTAGCTTTGTTTTTATTCATATGGATAAGCGA | | | | | |
| | | | | | TTCCACCATAAGCAGAAATCCATCTACCACAAGTTTTCAAG | | | | | |
| | | | | | GCCAAAATAGTAACGATAATAAGTTGAGTAATACTGGTTCT | | | | | |
| | | | | | AGCATCAATCC | | | | | |
| 431 | YDR294c | DPL1 | MSGVSNKTVSIIHGNYGMPIHLLR | 875 | ATGAGTGGAGTATCAAATAAAACAGTATCAATTAATGGTTG | 874 | aaatacaacaATGAGT | 1748 | gacagtcctgGTTGTA | 1749 |
| | | | EEGDFADFMILTINELKIAIHGYR | | GTATGGCATGCCAATTCATTTACTAAGGGAAGAAGGCGACT | | GGAGTATCAAATAA | | CCATGGGTATTTC | |
| | | | NTPWYN | | TTGCCCAGTTTATGATTCTAACCATCAACGAATTAAAAATA | | | | | |
| | | | | | GCCATACATGGTTACCTCAGAAATACCCCATGGTACAAC | | | | | |
| 432 | YDR304c | CPR5 | MKLQFFSFITLFACLFTTAIFAKE | 46 | ATGAAGCTTCAATTTTTTTCCTTTATTACCTTATTTGCTTG | 45 | acatacaacaATGAAC | 1750 | gacagtcctgAATTCT | 1751 |
| | | | DTAEDPEITHKVYFDINKGDKQIG | | TCTCTTCACAACAGCCATTTTTGCGAAAGAGGACACGGCAG | | TTCAATTTTTTTTC | | ACCAATTTGTTTAT | |
| | | | RI | | AAGATCCTGAGATCACACACAAGGTCTACTTGACATTAATC | | | | | |
| | | | | | ACGGTGATAAACAAATTGGTAGAATT | | | | | |
| 433 | YDR518w | EUG1 | MDVTTRFISAIVSFCLFASFTLAE | 50 | ATGCAAGTGACCACAAGATTTATATCTGCGATAGTCTCGTT | 49 | aaatacaacaATGCAA | 1752 | gacagtcctgATGAGA | 1753 |
| | | | NSARATPGSDLLVLTEKKFKSFIE | | TTGCCTGTTTGCTTCTTTCACGTTGGCTGAAAACAGCGCAA | | GTGACCACAAGATT | | TTCGATGAATGATT | |
| | | | SH | | GAGCTACGCCGGATCAGATTTACTCGTTCTAACAGAGAAGA | | | | | |
| | | | | | AATTTAAATCATTCATCGAATCTCAT | | | | | |
| 434 | YDR519w | FPR2 | MKFNIYLFVTFFSTILAGSLSDLE | 94 | ATGATGTTTAATATTTACCTTTTCGTCACTTTTTTTTCCAC | 93 | aaatacaacaATGATG | 1754 | gacagtcctgTCTTGA | 1755 |
| | | | IGIIKRIPVEDCLIKARPGDKVKV | | CATTCTTGCAGGTTCCCTGTCAGATTTGGAAATCGGTATTA | | TTTAATATTTACCT | | ATAACTGAGTCAA | |
| | | | HYTGSLLESGTVFDSSYSR | | TCAAGAGAATACCGGTAGAAGATTGCTTAATTAAGGCAATG | | | | | |
| | | | | | CCAGGTGATAAAGTTAAGGTTCATTATACAGGATCTTTTAT | | | | | |
| | | | | | TAGAATCGGGAACTGTATTTGACTCAAGTTATTCAAGA | | | | | |
| 435 | YEL036c | ANP1 | MKYNNRKLSFNPTTVSIAGTLLTV | 877 | ATGAAGTATAATAACAGAAAACTCTCGTTCAACCCTACCAC | 876 | aaatacaacaATGAAG | 1756 | gacagtcctgATCTTT | 1757 |
| | | | FFLTRLVLSFFSISLFQLVTFQGI | | AGTAAGTATCGCTGGAACGTTGCTTACGGTGTTCTTTCTCA | | TATAATAACAGAA | | GTTGCCTTGGTAAT | |
| | | | FKPYVPDFKNYTPSVEFYDLRNYQ | | CAAGACTCGTGCTTTCGTTCTTCTCGATATCGCTATTFCAG | | | | | |
| | | | GNKD | | CTGGTAACTTTCCAAGGAATCTTCAAGCCCTATGTTCCAGA | | | | | |
| | | | | | TTTTAAAATACTCCCAGAGCGTAGAGTTCTACGACCTACGA | | | | | |
| | | | | | AATTACCAAGGCAACAAAGAT | | | | | |
| 436 | YEL043w | | MPVSVITTVLAGLNLSYRLYKFLT | 879 | ATGCCAGTCTCTGTAATAACCACGGTTTTAGCATGTCTGTG | 878 | aaatacaacaATGCCA | 1758 | gacagtcctgCTGGAAGTA | 1759 |
| | | | IPVSSIVSTLKIKTPPATKVSIDK | | GCTCTCTTATAGGCTCTATAAGTTTCTCACTATTCCTGTGT | | GTCTCTGTAATAAC | | GTCCTCCG | |
| | | | IATDSVTIHWENEPVKAEDNGS | | CCAGCATCGTCTCCACTTTGAAGATCAAAACTCCACCGGCA | | | | | |
| | | | | | ACAAAAAGTGTCTATCGACAAAATAGCCACGGATTCAGTGA | | | | | |
| | | | | | CCATTCATTGGGAGAACGAACCTGTAAAAGCGGAGGAACAA | | | | | |
| | | | | | TGCAGT | | | | | |
| 437 | YER053c-a | | MQDLEIFLSIFAFIFVFYGAHRTV | 881 | ATGCAAGATTTAGAGATTTTTTGAGTATTTCGCTTTCATTT | 880 | aaatacaacaATGCAA | 1760 | gacagtcctgCTGCAA | 1761 |
| | | | NNRKKSDVPYLQ | | TCGTTTTCTACTTGGTGCTCATAGAACAGTCATGAACAGAA | | GATTTAGAGATTTT | | GTAAGGAACATCGC | |
| | | | | | ACAAGAGCGATGTTCCTTACTTGCAG | | | | | |
| 438 | YGL001c | ERG26 | MSKIDSVLIIGGSGFLGLHIQQFF | 883 | ATGTCAAAGATAGATTCAGTTTAATTATCGGTGGTTCTGGT | 882 | aaatacaacaATGTCA | 1762 | gacagtcctgTTTACT | 1763 |
| | | | DINPKPDIHIFDVRDLPEKLSKQF | | TTTCTTGGATTGCACTTAATTCAGCAATTTTTTGATATTAA | | AAGATAGATTCAGT | | TTCGTTAATTGCGT | |
| | | | TFNVDDIKFHKGDLTSPDDMENAI | | TCCTAAGCCAGACATCCACATTTTTGATGTTAGAGATCTCC | | | | | |
| | | | NESK | | CTGAAAAACTTTCAAAACAGTTTACTTTTAATGTAGACGAC | | | | | |
| | | | | | ATAAAATTCATAAGGGTGATTTAACATCACCTGATGATATG | | | | | |
| | | | | | AAAAACGCAATTAACGAAAAGTAAA | | | | | |
| 439 | YGL027c | CWH41 | HLISKSKMFKTFWILTSIVLLASA | 885 | ATGCTTATTTCAAAATCTAAGATGTTTAAACATTTTGGATA | 884 | aaatacaacaATGCTT | 1764 | gacagtcctgACTTTC | 1765 |
| | | | TVDISKLQEFEEYQKFTNESLLWA | | CTAACCAGCATAGTTCTCCTGGCATCTGCCACCGTTGATAT | | ATTTCAAAATCTAA | | ATGGACATATCTGG | |
| | | | PYRSNCYFGKRRYVHES | | TAGTAAACTACAAGAATTCGAAGAATATCAAAAGTTCACGA | | | | | |
| | | | | | ATGAATCTTTACTGTGGGCACCGTATAGATCCAATTGTTAC | | | | | |
| | | | | | TTTGGTATGAGCCCCAGATATGTCCATGAAAGT | | | | | |
| 440 | YGL038c | OCH1 | MSRKLSHLIATRKSKTIVVTVLLI | 887 | ATGTCTAGGAAGTTGTCCCACCTGATCGCTACAAGGAAATC | 886 | aaatacaacaATGTCT | 1786 | gacagtcctgATCACG | 1767 |
| | | | YSLLTFHSNKRLLSQFYPSKDDFQ | | AAAAACAATAGTCGTAACCGGTACTTCTTATTTATTCTTTG | | AGGAAGTTGTCCCA | | TAAATTATGCAATT | |
| | | | TLLPTTSHSQDIHLKKQITVKKKK | | TTGACATTTCACTTGTCAAACAAAAGGCTGCTTTCTCAGTT | | | | | |
| | | | QRLHNRD | | TTACCCTAGCAAAAGATGATTTCAAGCAAACTCTTCTCCCT | | | | | |
| | | | | | ACGACTTCTCATTCACAAGATATAAATTTGAAGAACAAATT | | | | | |
| | | | | | ACAGTTAACAAGAAAAAAAATCAATTGCATAATTTACGTGA | | | | | |
| | | | | | T | | | | | |

[0107] The gene regions encoding secretory signal peptides shown in Table 3 were amplified via PCR from the Saccharomyces cerevisiae genomic DNA. The sequences of the synthetic primers for the gene regions encoding secretory signal peptides used in PCR are as shown in Table 3. Each forward primer comprises at its 5′ end a sequence complementary to a 10-bp region encompassing the 3′ end of the HSP12 promoter contained in the pCLuRA-s plasmid. Each reverse primer comprises at its 5′ end a sequence complementary to a 10-bp region encompassing the 5′ end of the mature CLuc gene.

[0108] PCR was carried out using 50 μl of a reaction solution comprising 300 nM of each primer, 1 mM MgSO₄, 200 μM dNTP, 1 ng of yeast genomic DNA (derived from the Saccharomyces cerevisiae S288C strain, Invitrogen), and 1× buffer and KOD-Plus-1U included in the KOD-Plus-. The PCR cycle comprised: the first step at 94° C. for 2 minutes; 35 cycles of the second step at 94° C. for 15 seconds (denaturation), at 50° C. for 30 seconds (annealing), and at 68° C. for 1 minute (elongation); and the third step at 68° C. for 5 minutes. Thus, DNA fragments independently comprising at both of its ends 10-bp regions complementary to the HSP12 promoter and the mature CLuc gene contained in the pCLuRA-s plasmid and gene regions encoding secretory signal peptides were obtained. Hereafter, these DNA fragments are referred to as “1st PCR products.”

[0109] As the controls, a DNA fragment having at both of its ends 10-bp regions complementary to the HSP12 promoter and the mature CLuc gene and a gene region (nucleotide sequence: SEQ ID NO: 1768; amino acid sequence: SEQ ID NO: 1769) encoding the c-factor-derived secretory signal peptide (hereafter referred to as “DNA fragment E”) or a gene region (nucleotide sequence: SEQ ID NO: 1770; amino acid sequence: SEQ ID NO: 1771) encoding secretory signal peptide derived from yeast virus (M28 virus) toxin (K28 prepro-toxin) (hereafter referred to as “DNA fragment F”) used in conventional expression systems in yeast, as with the 1st PCR products, was prepared in the following manner.

[0110] DNA fragment E was amplified via PCR from the pCLuRA plasmid (see International Application Number: PCT/JP2006/311597, claiming the priority right of JP Patent Application No. 2005-169768).

[0111] The following synthetic primers were used. MF(ALPHA)1 Sig. F comprises at its 5′ end a sequence complementary to a 10-bp region encompassing the 3′ end of the HSP12 promoter contained in the pCLuRA-s plasmid. Also, MF(ALPHA)1 Sig. R comprises at its 5′ end a sequence complementary to a 10-bp region encompassing the 5′ end of the mature CLuc gene.

| | |
|---|---|
| MF(ALPHA)1 Sig. F: | |
| aaatacaaca-ATGAGATTTCCTTCAATTTT | (SEQ ID NO: 1772) |
| MF(ALPHA)1 Sig. R: | |
| gacagtcctg-AGCTTCAGCCTCTCTTTTCT | (SEQ ID NO: 1773) |

[0112] PCR was carried out using 50 μl of a reaction solution comprising 300 nM of each primer, 1 mM MgSO₄, 200 μM dNTP, 1 ng of the pCLuRA plasmid, and 1× buffer and KOD-Plus-1U included in the KOD-Plus-. The PCR cycle comprised: the first step at 94° C. for 2 minutes; 30 cycles of the second step at 94° C. for 15 seconds (denaturation), at 50° C. for 30 seconds (annealing), and at 68° C. for 1 minute (elongation); and the third step at 68° C. for 5 minutes. Thus, a DNA fragment E having at both of its ends 10-bp regions complementary to the HSP12 promoter and the mature CLuc gene contained in the pCLuRA-s plasmid and the gene regions encoding α-factor-derived secretory signal peptides, as with the 1st PCR product, was obtained.

[0113] DNA fragment F was prepared in the following manner.

[0114] A low-temperature-inducible expression vector, the aforementioned pLTex321 s vector (see Patent Document 2), was cleaved with XhoI and SphI, a DNA fragment was fractionated via agarose gel electrophoresis, and a vector fragment of approximately 7.3 kbp was obtained. This vector fragment is hereafter referred to as “DNA fragment G.”

[0115] Subsequently, the following synthetic DNAs were prepared in order to introduce tags for purifying the expressed proteins, i.e., the 6× His tag and the V5 antigen tag, into DNA fragment G.

[0116] V5-H tag F:

(SEQ ID NO: 1774)

TCGAGGGTAAGCCTATCCCTAACCCTCTCCTCGGTCTCGATTCTACGCGT
ACCGGTCATCATCACCATCACCATTGAGCATG

[0117] V5-H tag R:

(SEQ ID NO: 1775)

CTCAATGGTGATGGTGATGATGACCGGTACGCGTAGAATCGAGACCGAGG
AGAGGGTTAGGGATAGGCTTACCC

[0118] These synthetic DNAs were annealed, the double-stranded synthetic DNA was ligated to DNA fragment G using the DNA Ligation Kit ver. 2.1, and the ligation product was introduced into E. coli DH5α.

[0119] The resulting transformant was cultured overnight, plasmids were extracted using the GenElute Plasmid Miniprep Kit, and a transformant having a plasmid of interest was identified based on the restriction enzyme cleavage pattern and via nucleotide sequence analysis. The pLTex321sV5H vector was prepared from the transformant.

[0120] The resulting vector, pLTex321sV5H, was cleaved with SmaI and EcoRI, a DNA fragment was fractionated via agarose gel electrophoresis, and a vector fragment of approximately 7.4 kbp was obtained. This vector fragment is hereafter referred to as “DNA fragment H.”

[0121] Subsequently, the following synthetic DNAs were prepared in order to introduce the gene region encoding the preprotoxin-derived secretory signal peptide into DNA fragment H.

[0122] K28 PPT Sig. F:

(SEQ ID NO: 1776)

ATGGAATCTGTTTCTTCTTTGTTTAATATTTTTTCTACTATTATGGTTAA
TTATAAATCTTTGGTTTTGG

[0123] K28 PPT Sig. R:

(SEQ ID NO: 1777)

GGAATTCCTGCAGCCCGGGCAAATTAGAAACAGACAACAAAGCCAAAACC
AAAGATTTATAATTAACCAT

[0124] These synthetic DNAs were annealed, and the 3′ ends of the strands of the annealed double-stranded synthetic DNA were subjected to elongation using the Klenow fragment (TOYOBO). Thereafter, the resulting DNA fragment was cleaved with EcoRI, the cleavage product was ligated to DNA fragment H using the DNA Ligation Kit ver. 2.1, and the resultant was introduced into E. coli DH5α.

[0125] The resulting transformant was cultured overnight, plasmids were extracted using the GenElute Plasmid Miniprep Kit, and a transformant having a plasmid of interest was identified based on the restriction enzyme cleavage pattern and via nucleotide sequence analysis. The pLTex321sV5H K28 vector was prepared from the transformant.

[0126] Further, the 3′ end of the gene region encoding the preprotoxin-derived secretory signal peptide, which had been introduced into the pLTex321sV5H K28 vector, was elongated via PCR.

[0127] The following synthetic primers were used. K28 Sig. F is a 24-bp region encompassing the 5′ end of the gene region encoding the preprotoxin-derived secretory signal peptide in the pLTex321sV5H K28 vector. K28 Sig. R (36) comprises a DNA sequence complementary to 25-bp region encompassing the 3′ end of the gene region encoding the preprotoxin-derived secretory signal peptide in the pLTex321sV5H K28 vector, a DNA sequence encoding 5 amino acid residues to be elongated, and a DNA sequence containing SmaI, PstI, and EcoRI restriction enzyme cleavage sites.

[0128] K28 Sig. F: ATGGAATCTGTTTCTTCTTTGTTT (SEQ ID NO: 1778)

[0129] K28 Sig. R (36): GGAATTCCTGCAGCCCGGG-ACCTCTAGCATATTT-CAAATTAGAAACAGACAACAAAGCC (SEQ ID NO: 1779)

[0130] PCR was carried out using 50 μl of a reaction solution comprising 300 nM of each primer, 1 mM MgSO₄, 200 μM dNTP, 1 ng of the pLTex321sV5H K28 vector, and 1× buffer and KOD-Plus-1U included in the KOD-Plus-. The PCR cycle comprised: the first step at 94° C. for 2 minutes; 30 cycles of the second step at 94° C. for 15 seconds (denaturation), at 50° C. for 30 seconds (annealing), and at 68° C. for 30 seconds (elongation); and the third step at 68° C. for 5 minutes.

[0131] The DNA fragment obtained via such PCR was treated with EcoRI, ligated to DNA fragment H using the DNA Ligation Kit ver. 2.1, and introduced into E. coli DH5α.

[0132] The resulting transformant was cultured overnight, plasmids were extracted using the GenElute Plasmid Miniprep Kit, and a transformant having a plasmid of interest was identified based on the restriction enzyme cleavage pattern and via nucleotide sequence analysis. The pLTex321sV5H K28L vector was prepared from the transformant.

[0133] The pLTex321sV5H K28L vector was used as a template, and a DNA fragment (DNA fragment F) containing a gene region encoding the preprotoxin-derived secretory signal peptide was amplified via PCR. The following synthetic primers were used. K28L Sig. F comprises at its 5′ end a sequence complementary to a 10-bp region encompassing the 3′ end of the HSP12 promoter contained in the pCLuRA-s plasmid. Also, K28L Sig. R comprises at its 5′ end a sequence complementary to a 10-bp region encompassing the 5′ end of the mature CLuc gene.

| | |
|---|---|
| K28L Sig. F: | |
| aaatacaaca-ATGGAATCTGTTTCTTCTTT | (SEQ ID NO: 1780) |
| K28L Sig. R: | |
| gacagtcctg-ACCTCTAGCATATTTCAAAT | (SEQ ID NO: 1781) |

[0134] PCR was carried out using 50 μl of a reaction solution comprising 300 nM of each primer, 1 mM MgSO₄, 200 μM dNTP, 1 ng of the pLTex321sV5H K28L vector, and 1× buffer and KOD-Plus-1U included in the KOD-Plus-. The PCR cycle comprised: the first step at 94° C. for 15 seconds; 30 cycles of the second step at 94° C. for 15 seconds (denaturation), at 50° C. for 30 seconds (annealing), and at 68° C. for 1 minute (elongation); and the third step at 68° C. for 5 minutes. Thus, a DNA fragment (DNA fragment F) having at both of its ends 10-bp regions complementary to the HSP12 promoter and the mature CLuc gene contained in the pCLuRA-s plasmid and the gene region encoding the preprotoxin-derived secretory signal peptide, as with the 1st PCR product, was obtained.

[0135] In order to elongate the regions complementary to the pCLuRA-s plasmids at both ends of the DNA fragment containing the gene region encoding each secretory signal peptide, amplification was further carried out via PCR.

[0136] The following synthetic primers were used. 2nd PCR F comprises a sequence complementary to a 50-bp region encompassing the 3′ end of the HSP12 promoter region. 2nd PCR R comprises a sequence complementary to a 50-bp region encompassing the 5′ end of the mature CLuc gene.

[0137] 2nd PCR F:

(SEQ ID NO: 1782)

TTCGATAATCTCAAACAAACAACTCAAAACAAAAAAAACT-AAATACAAC
A

[0138] 2nd PCR R:

(SEQ ID NO: 1783)

CAGGAAGTTGGAACTGTGTTTGGTGGATCAGGTTCGTAAG-GACAGTCCT
G

[0139] PCR was carried out using 50 μl of a reaction solution comprising 300 nM of each primer, 1 mM MgSO₄, 200 μM dNTP, a 10-fold diluted 1st PCR product, 1 μl of DNA fragment E or DNA fragment F, and 1× buffer and KOD-Plus-1U included in the KOD-Plus-. The PCR cycle comprised: the first step at 94° C. for 2 minutes; 35 cycles of the second step at 94° C. for 15 seconds (denaturation), at 50° C. for 30 seconds (annealing), and at 68° C. for 1 minute (elongation); and the third step at 68° C. for 5 minutes. Thus, a DNA fragment having at both of its ends 50-bp regions complementary to the HSP12 promoter and the mature CLuc gene contained in the pCLuRA-s plasmid and the gene region encoding each of 440 types of secretory signal peptides, a DNA fragment comprising a gene region encoding the α-factor-derived secretory signal peptide, or a DNA fragment comprising a gene region encoding the preprotoxin-derived secretory signal peptide was obtained. Hereafter, these DNA fragments are referred to as “2nd PCR products.”

### Example 3

### Construction of Secretory Signal Peptide Library

[0140] Using the 2nd PCR products obtained in Example 2 and the reporter vector, pCLuRA-s, prepared in Example 1, the secretory signal peptide library using the Saccharomyces cerevisiae host was constructed in the following manner.

[0141] The pCLuRA-s plasmid was cleaved with BamHI and HindIII, a DNA fragment was fractionated via agarose gel electrophoresis, and a DNA fragment of approximately 7.3 kbp was obtained. Hereafter, this DNA fragment is referred to as “DNA fragment I.”

[0142] As the host of this library the Saccharomyces cerevisiae BY4743 PEP4Δ PRB1Δ strain was used. The BY4743 PEP4Δ PRB1Δ strain was prepared by producing the BY4741 PEP4Δ PRB1Δ strain and the BY4742 PEP4Δ PRB1Δ strain in which the PEP4 and PRB1 genes encoding major protease in the Saccharomyces cerevisiae BY4741 strain (Invitrogen) and the BY4742 strain (Invitrogen) had been disrupted by the method of Hegemann et al. (http://mips.gsf.de/proj/yeast/info/tools/hegemann/loxp_kanmx.html), and coupling these strains.

[0143] Using, as a template, the pUG6 plasmid (http://mips.gsf.de/proj/yeast/info/tools/hegemann/loxp_kanmx.html), a DNA fragment that is necessary for disrupting the PEP4 gene was first amplified via PCR. The following synthetic primers were used. dPEP4 kan F has at its 5′ end a sequence complementary to a 40-bp upstream region of the PEP4 gene and at its 3′ end a sequence complementary to a 19-bp upstream region of the loxP-kanMX-loxP module region of pUG6. dPEP4 kan R has at its 5′ end a sequence complementary to a 40-bp downstream region of the PEP4 gene and at its 3′ end a sequence complementary to a 22-bp downstream region of the loxP-kanMX-loxP module region of pUG6.

[0144] dPEP4 kan F:

(SEQ ID NO: 1784)

ATTTAATCCAAATAAAATTCAAACAAAAACCAAAACTAAC-CAGCTGAAG
CTTCGTACGC

[0145] dPEP4 kan R:

(SEQ ID NO: 1785)

GGCAGAAAAGGATAGGGCGGAGAAGTAAGAAAAGTTTAGC-GCATAGGCC
ACTAGTGGATCTG

[0146] PCR was carried out using 50 μl of a reaction solution comprising 300 nM of each primer, 1 mM MgSO₄, 200 μM dNTP, 1 ng of the pUG6 plasmid, and 1× buffer and KOD-Plus-1U included in the KOD-Plus-. The PCR cycle comprised: the first step at 94° C. for 15 seconds; 30 cycles of the second step at 94° C. for 15 seconds (denaturation), at 50° C. for 30 seconds (annealing), and at 68° C. for 2 minutes (elongation); and the third step at 68° C. for 5 minutes. Thus, a DNA fragment having at both of its ends sequences complementary to 40-bp upstream and downstream regions of the PEP4 gene and containing the loxP-kanMX-loxP module region was obtained. This DNA fragment was used to disrupt the PEP4 genes of the BY4741 strain and the BY4742 strain by the method of Hegemann et al. to obtain the BY4741 PEP4Δ strain and the BY4742 PEP4Δ strain.

[0147] Further, a DNA fragment, which is necessary for disrupting the PRB1 gene, was prepared via PCR. The following synthetic primers were used. dPRB1 kan F has at its 5′ end a sequence complementary to a 40-bp upstream region of the PRB1 gene and at its 3′ end a sequence complementary to a 19-bp upstream region of the loxP-kanMX-loxP module region of pUG6. dPRB1 kan R has at its 5′ end a sequence complementary to a 40-bp downstream region of the PRB1 gene and at its 3′ end a sequence complementary to a 22-bp downstream region of the loxP-kanMX-loxP module region of pUG6.

[0148] dPRB 1 kan F:

(SEQ ID NO: 1786)

CAATAAAAAAACAAACTAAACCTAATTCTAACAAGCAAAG-CAGCTGAAG
CTTCGTACGC

[0149] dPRB 1 kan R:

(SEQ ID NO: 1787)

AAGAAAAAAAAAAGCAGCTGAAATTTTTCTAAATGAAGAA-GCATAGGCC
ACTAGTGGATCTG

[0150] PCR was carried out using 50 μl of a reaction solution comprising 300 nM of each primer, 1 mM MgSO₄, 200 μM dNTP, 1 ng of the pUG6 plasmid, and 1× buffer and KOD-Plus-1U included in the KOD-Plus-. The PCR cycle comprised: the first step at 94° C. for 15 seconds; 30 cycles of the second step at 94° C. for 15 seconds (denaturation), at 50° C. for 30 seconds (annealing), and at 68° C. for 2 minutes (elongation); and the third step at 68° C. for 5 minutes. Thus, a DNA fragment having at both of its ends sequences complementary to 40-bp upstream and downstream regions of the PRB1 gene and the loxP-kanMX-loxP module region was obtained.

[0151] This DNA fragment was used to disrupt the PRB1 genes of the BY4741 PEP4Δ strain and the BY4742 PEP4Δ strain by the method of Hegemann et al. to obtain the BY4741 PEP4Δ PRB1Δ strain and the BY4742 PEP4Δ PRB1Δ strain.

[0152] The BY4741 PEP4Δ PRB1Δ strain was mated to the BY4742 PEP4Δ PRB1Δ strain by a conventional technique to obtain the BY4743 PEP4Δ PRB1Δ diploid strain.

[0153] Transformation was carried out using the 2nd PCR products of the BY4743 PEP4Δ PRB1Δ strain and DNA fragment I in the following manner.

[0154] The BY4743 PEP4Δ PRB1Δ strain was cultured in a YPD medium (1% yeast extract, 2% peptone, and 2% glucose) at 30° C. to a stationary phase, the strain was recovered from 250 μl of the culture solution via centrifugation, the strain was washed with 100 μl of sterile water, and the strain was further recovered via centrifugation.

[0155] The obtained strain was suspended in 60 μl of a yeast transformation solution (33.3% polyethylene glycol (PEG) 4,000, 100 mM of lithium acetate, 250 μg/ml of carrier DNA (Clontech), 10 ng of DNA fragment I, and 2 μl of each 10-fold diluted 2nd PCR product) and then cultured at 30° C. for 30 minutes. Thereafter, 6 μl of dimethyl sulfoxide (DMSO) was added, and culture was further carried out at 42° C. for an additional 1 hour. Thereafter, 1 ml of the SD+HL medium (0.67% yeast nitrogen base without amino acid, 2% glucose, 0.002% L-histidine HCl, and 0.01% L-leucine) was inoculated with 10 μl of the culture solution, and culture was carried out at 30° C. for 3 days. Thus, homologous recombination of DNA fragment I and each 2nd PCR product took place in the host BY4743 PEP4Δ PRB1Δ strain. Under the control (downstream) of the HSP12 promoter, the BY4743 PEP4Δ PRB1Δ strain sustaining a reporter plasmid in which the gene region encoding each secretory signal peptide has been fused to the 5′ terminus of the mature CLuc gene was selectively allowed to grow by introducing a uracil requirement. Thus, the secretory signal peptide library utilizing the Saccharomyces cerevisiae host was constructed.

[0156] Some of the resulting strains were subjected to sequence analysis of reporter plasmids, and the generation of the plasmid of interest was confirmed in the yeast cell.

### Example 4

### Evaluation of the Secretion Ability of the Secretory Signal Peptide

[0157] With the use of the secretory signal peptide library using the Saccharomyces cerevisiae host constructed in Example 3, the secretion ability of the secretory signal peptide was evaluated with the use of mature CLuc (secreted luciferase) in the following manner.

[0158] One ml of SD+HL+PPB medium (0.67% yeast nitrogen base without amino acid, 2% glucose, 0.002% L-histidine HCl, 0.01% L-leucine, and 200 mM potassium phosphate buffer (pH 6.0)) was inoculated with the Saccharomyces cerevisiae (the secretory signal peptide library) sustaining a reporter plasmid containing the gene region encoding each secretory signal peptide prepared in Example 3, and culture was conducted at 30° C. for 3 days. This culture solution was designated as the preculture, and part thereof was used in the following culture.

[0159] One ml of SD+HL+PPB medium was inoculated with the culture solution (10 μl) obtained via the preculture and culture was conducted at 30° C. to the logarithmic growth phase.

[0160] Using the culture solution that had been cultured until the logarithmic growth phase, activity of the mature CLuc (secreted luciferase) secreted in the culture was assayed to evaluate the secretion ability of each secretory signal peptide.

[0161] Activity of luciferase was assayed in the following manner.

[0162] To the culture solution (20 μl), 80 μl of a 2.5 μM luciferin solution was added, and, 2 seconds thereafter, the luminescence level was assayed for 5 seconds. Simultaneously, 200 μl of the culture solution was used to assay the absorbance thereof at 600 nm, and the luminescence level was divided by the obtained value to normalize the luciferase activity value based on the absorbance.

[0163] The results are shown in Table 4. Table 4 shows the relative secretion efficiency of the secretory signal peptides (indicated in terms of systematic and common names of the genes from which these secretory signal peptides have been derived) at moderate culture temperature (30° C.) in relation to that of the α-factor-derived secretory signal peptide. The secretory signal peptides used in conventional secretory expression systems are shaded. The result of assaying the secretion efficiency of the α-factor-derived secretory signal peptide is shown in the column indicated as “α-factor” in terms of common names. The result of assaying the secretion efficiency of the preprotoxin-derived secretory signal peptide is shown in the column indicated as “K28L” in terms of common names.

TABLE 4
Table 4: Secretion efficiency of each of secretory signal peptides at
moderate culture temperature (30° C.)

| | | Secretion |
|---|---|---|
| | | efficiency relative |
| | | to α-factor- |
| Systematic gene | Common gene | derived secretory |
| name | name | signal peptide |
| YDR420w | HKR1 | 5.64 |
| YBR187w | | 3.37 |
| YGL126w | SCS3 | 3.27 |
| YHR139c | SPS100 | 2.69 |
| YGR014w | MSB2 | 2.66 |
| YBR078w | ECM33 | 2.48 |
| YNL300w | TOS6 | 2.46 |
| YLR084c | RAX2 | 2.27 |
| YMR008c | PLB1 | 2.04 |
| YCR061w | | 2.00 |
| YDR055w | PST1 | 1.91 |
| YLR110c | CCW12 | 1.85 |
| YNL160w | YGP1 | 1.77 |
| YLR250w | SSP120 | 1.68 |
| YBR042c | CST26 | 1.65 |
| YDR134c | | 1.64 |
| YBR296c | PHO89 | 1.54 |
| YLR034c | SMF3 | 1.51 |
| YBR243c | ALG7 | 1.49 |
| YLR332w | MID2 | 1.44 |
| YDR077w | SED1 | 1.41 |
| YPL234c | TFP3 | 1.34 |
| YDR261c | EXG2 | 1.32 |
| YBR070c | SAT2 | 1.31 |
| YGR189c | CRH1 | 1.27 |
| YKL096w-a | CWP2 | 1.25 |
| YLR300w | EXG1 | 1.25 |
| YIL140w | AXL2 | 1.25 |
| YHR181w | SVP26 | 1.24 |
| YEL001c | | 1.23 |
| YCL043c | PDI1 | 1.19 |
| YGL032c | AGA2 | 1.19 |
| YNL237w | YTP1 | 1.17 |
| YIL090w | | 1.07 |
| YDR518w | EUG1 | 1.07 |
| YEL040w | UTR2 | 1.02 |
| YOR190w | SPR1 | 1.02 |
| | α-factor | 1.00 |
| YHR079c | IRE1 | 0.98 |
| YBR293w | | 0.96 |
| YNR044w | AGA1 | 0.92 |
| YFL041w | FET5 | 0.92 |
| YNL066w | SUN4 | 0.89 |
| YCR028c | FEN2 | 0.87 |
| YNL327w | EGT2 | 0.86 |
| YNR067c | DSE4 | 0.85 |
| YKL209c | STE6 | 0.78 |
| YNL190w | | 0.78 |
| YAL058w | CNE1 | 0.77 |
| YPR124w | CTR1 | 0.77 |
| YCR017c | CWH43 | 0.76 |
| YDR205w | MSC2 | 0.76 |
| YJL078c | PRY3 | 0.74 |
| YCR011c | ADP1 | 0.71 |
| YNL322c | KRE1 | 0.71 |
| YKL163w | PIR3 | 0.69 |
| YER145c | FTR1 | 0.68 |
| YER113c | | 0.65 |
| YDR056c | | 0.64 |
| YDR304c | CPR5 | 0.63 |
| YIL162w | SUC2 | 0.62 |
| YLR286c | CTS1 | 0.62 |
| YER118c | SHO1 | 0.61 |
| YMR006c | PLB2 | 0.61 |
| YOL011w | PLB3 | 0.61 |
| YPL189w | GUP2 | 0.60 |
| YDR057w | YOS9 | 0.59 |
| YDR144c | MKC7 | 0.58 |
| YNL219c | ALG9 | 0.56 |
| YLR050c | | 0.54 |
| YKL096w | CWP1 | 0.53 |
| YMR307w | GAS1 | 0.53 |
| YCL027w | FUS1 | 0.53 |
| YNL238w | KEX2 | 0.52 |
| YGL038c | OCH1 | 0.52 |
| YMR058w | FET3 | 0.51 |
| YDR349c | YPS7 | 0.51 |
| YLR207w | HRD3 | 0.50 |
| YFL051c | | 0.50 |
| YJL159w | HSP150 | 0.50 |
| YAR071w | PHO11 | 0.47 |
| | K28L | 0.47 |
| YDL072c | YET3 | 0.43 |
| YBR093c | PHO5 | 0.41 |
| YDR276c | PMP3 | 0.40 |
| YAL053w | | 0.40 |
| YHR110w | ERP5 | 0.40 |
| YIL039w | | 0.39 |
| YMR200w | ROT1 | 0.38 |
| YDR519w | FPR2 | 0.38 |
| YCR021c | HSP30 | 0.37 |
| YFL026w | STE2 | 0.37 |
| YOR008c | SLG1 | 0.37 |
| YGL089c | MF(ALPHA)2 | 0.37 |
| YPL187w | MF(ALPHA)1 | 0.36 |
| YJR118c | ILM1 | 0.36 |
| YNL291c | MID1 | 0.35 |
| YDR367w | | 0.35 |
| YEL004w | YEA4 | 0.34 |
| YNL194c | | 0.34 |
| YAL063c | FLO9 | 0.32 |
| YHR143w | DSE2 | 0.32 |
| YNR030w | ECM39 | 0.31 |
| YBR183w | YPC1 | 0.29 |
| YGL020c | MDM39 | 0.28 |
| YIL027c | KRE27 | 0.28 |
| YDR536w | STL1 | 0.27 |
| YGR279c | SCW4 | 0.26 |
| YGL027c | CWH41 | 0.26 |
| YKL164c | PIR1 | 0.26 |
| YBR092c | PHO3 | 0.26 |
| YFR041c | ERJ5 | 0.25 |
| YKL221w | MCH2 | 0.25 |
| YPL130w | SPO19 | 0.25 |
| YAL007c | ERP2 | 0.25 |
| YBR229c | ROT2 | 0.25 |
| YJL193w | | 0.24 |
| YLR155c | ASP3-1 | 0.24 |
| YDR221w | | 0.24 |
| YDL212w | SHR3 | 0.21 |
| YEL036c | ANP1 | 0.19 |
| YLR413w | | 0.17 |
| YLR120c | YPS1 | 0.17 |
| YAR050w | FLO1 | 0.17 |
| YJL174w | KRE9 | 0.16 |
| YMR171c | | 0.16 |
| YDL093w | PMT5 | 0.16 |
| YKL187c | | 0.16 |
| YGR282c | BGL2 | 0.15 |
| YKL051w | SFK1 | 0.15 |
| YBR067c | TIP1 | 0.15 |
| YMR119w | ASI1 | 0.15 |
| YJL158c | CIS3 | 0.15 |
| YJL051w | | 0.15 |
| YLR037c | DAN2 | 0.15 |
| YLR390w-a | CCW14 | 0.14 |
| YGL028c | SCW11 | 0.14 |
| YDR534c | FIT1 | 0.14 |
| YBR301w | DAN3 | 0.14 |
| YNR018w | | 0.14 |
| YEL002c | WBP1 | 0.14 |
| YPR091c | | 0.13 |
| YLR121c | YPS3 | 0.13 |
| YIL147c | SLN1 | 0.12 |
| YOL105c | WSC3 | 0.12 |
| YMR149w | SWP1 | 0.12 |
| YCL045c | | 0.11 |
| YMR305c | SCW10 | 0.11 |
| YBL017c | PEP1 | 0.10 |
| YBR210w | ERV15 | 0.09 |
| YLR214w | FRE1 | 0.09 |
| YML116w | ATR1 | 0.09 |
| YML012w | ERV25 | 0.09 |
| YNL283c | WSC2 | 0.09 |
| YOR010c | TIR2 | 0.09 |
| YJL222w | VTH2 | 0.09 |
| YJR150c | DAN1 | 0.08 |
| YBR205w | KTR3 | 0.08 |
| YNL142w | MEP2 | 0.08 |
| YKL174c | | 0.07 |
| YGR213c | RTA1 | 0.07 |
| YMR243c | ZRC1 | 0.07 |
| YLR414c | | 0.07 |
| YCR069w | CPR4 | 0.07 |
| YBR036c | CSG2 | 0.07 |
| YER011w | TIR1 | 0.07 |
| YKL220c | FRE2 | 0.06 |
| YOL019w | TOS7 | 0.06 |
| YKL178c | STE3 | 0.06 |
| YLR087c | CSF1 | 0.06 |
| YJL002c | OST1 | 0.06 |
| YEL027w | CUP5 | 0.05 |
| YCR034w | FEN1 | 0.05 |
| YKL039w | PTM1 | 0.05 |
| YHR140w | | 0.05 |
| YBR054w | YRO2 | 0.05 |
| YKL034w | TUL1 | 0.05 |
| YOR149c | SMP3 | 0.05 |
| YPR201w | ARR3 | 0.05 |
| YBR241c | | 0.05 |
| YLR242c | ARV1 | 0.05 |
| YNR055c | HOL1 | 0.05 |
| YMR266w | RSN1 | 0.05 |
| YOR011w | AUS1 | 0.04 |
| YIL005w | EPS1 | 0.04 |
| YJR004c | SAG1 | 0.04 |
| YOL030w | GAS5 | 0.04 |
| YDR038c | ENA5 | 0.04 |
| YDR245w | MNN10 | 0.04 |
| YBR004c | FMP44 | 0.04 |
| YPL096c-a | ERI1 | 0.04 |
| YJL012c-a | | 0.04 |
| YHL016c | DUR3 | 0.04 |
| YLR459w | GAB1 | 0.04 |
| YDR384c | ATO3 | 0.03 |
| YDR040c | ENA1 | 0.03 |
| YAL067c | SEO1 | 0.03 |
| YEL017c-a | PMP2 | 0.03 |
| YGL255w | ZRT1 | 0.03 |
| YIL015w | BAR1 | 0.03 |
| YKR102w | FLO10 | 0.03 |
| YOR104w | PIN2 | 0.02 |
| YJL171c | | 0.02 |
| YDL052c | SLC1 | 0.02 |
| YIR028w | DAL4 | 0.02 |
| YHL042w | | 0.02 |
| YBR040w | FIG1 | 0.02 |
| YHR101c | BIG1 | 0.02 |
| YIL170w | HXT12 | 0.02 |
| YDL018c | ERP3 | 0.02 |
| YOR085w | OST3 | 0.02 |
| YBR021w | FUR4 | 0.02 |
| YJR013w | GPI14 | 0.02 |
| YER053c-a | | 0.02 |
| YLR220w | CCC1 | 0.02 |
| YHL035c | VMR1 | 0.02 |
| YDR033w | MRH1 | 0.02 |
| YIR019c | MUC1 | 0.02 |
| YDL210w | UGA4 | 0.02 |
| YER072w | VTC1 | 0.02 |
| YEL065w | SIT1 | 0.02 |
| YCR024c-a | PMP1 | 0.02 |
| YHL036w | MUP3 | 0.02 |
| YGL203c | KEX1 | 0.02 |
| YJL062w | LAS21 | 0.02 |
| YIL013c | PDR11 | 0.02 |
| YDL035c | GPR1 | 0.01 |
| YCR044c | PER1 | 0.01 |
| YMR238w | DFG5 | 0.01 |
| YAL018c | | 0.01 |
| YML123c | PHO84 | 0.01 |
| YOL013c | HRD1 | 0.01 |
| YBR199w | KTR4 | 0.01 |
| YKL046c | DCW1 | 0.01 |
| YEL043w | | 0.01 |
| YKR039w | GAP1 | 0.01 |
| YKL004w | AUR1 | 0.01 |
| YDR046c | BAP3 | 0.01 |
| YDR072c | IPT1 | 0.01 |
| YJR040w | GEF1 | 0.01 |
| YCR037c | PHO87 | 0.01 |
| YLL061w | MMP1 | 0.01 |
| YJR151c | DAN4 | 0.01 |
| YKR040c | | 0.01 |
| YLL015w | BPT1 | 0.01 |
| YML038c | YMD8 | 0.01 |
| YGR121c | MEP1 | 0.01 |
| YPL232w | SSO1 | 0.01 |
| YDR331w | GPI8 | 0.01 |
| YPL265w | DIP5 | 0.01 |
| YGL008c | PMA1 | 0.01 |
| YBR069c | TAT1 | 0.01 |
| YDR090c | | 0.01 |
| YGR191w | HIP1 | 0.01 |
| YGR055w | MUP1 | 0.01 |
| YOL084w | PHM7 | 0.01 |
| YPR138c | MEP3 | 0.01 |
| YEL063c | CAN1 | 0.01 |
| YCR098c | GIT1 | 0.01 |
| YJR158w | HXT16 | 0.01 |
| YFL011w | HXT10 | 0.01 |
| YKL065c | YET1 | 0.01 |
| YGL002w | ERP6 | 0.01 |
| YGL139w | | 0.01 |
| YCL025c | AGP1 | 0.01 |
| YDL199c | | 0.01 |
| YBL089w | AVT5 | 0.01 |
| YDL245c | HXT15 | 0.01 |
| YCR023c | | 0.01 |
| YBL042c | FUI1 | 0.01 |
| YGR065c | VHT1 | 0.01 |
| YMR319c | FET4 | 0.01 |
| YNL318c | HXT14 | 0.01 |
| YHR096c | HXT5 | 0.01 |
| YFL050c | ALR2 | 0.01 |
| YMR183c | SSO2 | 0.01 |
| YDR093w | DNF2 | 0.01 |
| YDR011w | SNQ2 | 0.01 |
| YLR023c | IZH3 | 0.01 |
| YOL103w | ITR2 | 0.01 |
| YDR342c | HXT7 | 0.01 |
| YHR094c | HXT1 | 0.01 |
| YJR152w | DAL5 | 0.01 |
| YBR068c | BAP2 | 0.01 |
| YBR096w | | 0.01 |
| YJL214w | HXT8 | 0.01 |
| YNL280c | ERG24 | 0.01 |
| YJL219w | HXT9 | 0.01 |
| YKR093w | PTR2 | 0.01 |
| YLR237w | THI7 | 0.01 |
| YHR092c | HXT4 | 0.01 |
| YKR050w | TRK2 | 0.01 |
| YJR160c | MPH3 | 0.01 |
| YDR343c | HXT6 | 0.01 |
| YDL247w | MPH2 | 0.01 |
| YER060w | FCY21 | 0.01 |
| YOR328w | PDR10 | 0.01 |
| YNL048w | ALG11 | 0.01 |
| YJL129c | TRK1 | 0.01 |
| YBR038w | CHS2 | 0.01 |
| YDR345c | HXT3 | 0.01 |
| YGR260w | TNA1 | 0.01 |
| YBR086c | IST2 | 0.01 |
| YOR153w | PDR5 | 0.01 |
| YGR032w | GSC2 | 0.01 |
| YBR140c | IRA1 | 0.00 |
| YGL054c | ERV14 | 0.00 |
| YER056c | FCY2 | 0.00 |
| YJL093c | TOK1 | 0.00 |
| YKR053c | YSR3 | 0.00 |
| YEL069c | HXT13 | 0.00 |
| YGR281w | YOR1 | 0.00 |
| YIL047c | SYG1 | 0.00 |
| YBR023c | CHS3 | 0.00 |
| YCL038c | ATG22 | 0.00 |
| YDL138w | RGT2 | 0.00 |
| YDR497c | ITR1 | 0.00 |
| YKL100c | | 0.00 |
| YEL031w | SPF1 | 0.00 |
| YBR041w | FAT1 | 0.00 |
| YER166w | DNF1 | 0.00 |
| YDR032c | PST2 | 0.00 |
| YLR081w | GAL2 | 0.00 |
| YFL017c | GNA1 | 0.00 |
| YGR026w | | 0.00 |
| YKL083w | | 0.00 |
| YBR294w | SUL1 | 0.00 |
| YGL077c | HNM1 | 0.00 |
| YDR461w | MFA1 | 0.00 |
| YER008c | SEC3 | 0.00 |
| YPL221w | BOP1 | 0.00 |
| YNR039c | ZRG17 | 0.00 |
| YHR149c | SKG6 | 0.00 |
| YOL156w | HXT11 | 0.00 |
| YGL001c | ERG26 | 0.00 |
| YDL194w | SNF3 | 0.00 |
| YLR138w | NHA1 | 0.00 |
| YJL094c | KHA1 | 0.00 |
| YNL087w | TCB2 | 0.00 |
| YER060w-a | FCY22 | 0.00 |
| YOR016c | ERP4 | 0.00 |
| YNR013c | PHO91 | 0.00 |
| YPL092w | SSU1 | 0.00 |
| YAL022c | FUN26 | 0.00 |
| YNL268w | LYP1 | 0.00 |
| YPR003c | | 0.00 |
| YBR298c | MAL31 | 0.00 |
| YOL075c | | 0.00 |
| YMR011w | HXT2 | 0.00 |
| YCR048w | ARE1 | 0.00 |
| YNL270c | ALP1 | 0.00 |
| YGR138c | TPO2 | 0.00 |
| YOL122c | SMF1 | 0.00 |
| YDR294c | DPL1 | 0.00 |
| YMR274c | RCE1 | 0.00 |
| YOL158c | ENB1 | 0.00 |
| YDR126w | SWF1 | 0.00 |
| YOR002w | ALG6 | 0.00 |
| YLL052c | AQY2 | 0.00 |
| YOL020w | TAT2 | 0.00 |
| YNL192w | CHS1 | 0.00 |
| YGL084c | GUP1 | 0.00 |
| YDR264c | AKR1 | 0.00 |
| YKR106w | | 0.00 |
| YCR089w | FIG2 | 0.00 |
| YPR194c | OPT2 | 0.00 |
| YDR062w | LCB2 | 0.00 |
| YPL274w | SAM3 | 0.00 |
| YIL120w | QDR1 | 0.00 |
| YIL121w | QDR2 | 0.00 |
| YOR273c | TPO4 | 0.00 |
| YKL217w | JEN1 | 0.00 |
| YBR295w | PCA1 | 0.00 |
| YLL028w | TPO1 | 0.00 |
| YOL130w | ALR1 | 0.00 |
| YPR156c | TPO3 | 0.00 |
| YGR197c | SNG1 | 0.00 |
| YGL161c | YIP5 | 0.00 |
| YGL012w | ERG4 | 0.00 |
| YKR105c | | 0.00 |
| YPL249c | GYP5 | 0.00 |
| YDL123w | SNA4 | 0.00 |
| YNL145w | MFA2 | 0.00 |
| YBR106w | PHO88 | 0.00 |
| YOL092w | | 0.00 |
| YLR353w | BUD8 | 0.00 |
| YDR508c | GNP1 | 0.00 |
| YBR043c | QDR3 | 0.00 |
| YFL055w | AGP3 | 0.00 |
| YJL117w | PHO86 | 0.00 |
| YDR039c | ENA2 | 0.00 |
| YBR132c | AGP2 | 0.00 |
| YNL065w | AQR1 | 0.00 |
| YBR180w | DTR1 | 0.00 |
| YNR072w | HXT17 | 0.00 |
| YOR348c | PUT4 | 0.00 |
| YGR289c | MAL11 | 0.00 |
| YGL198w | YIP4 | 0.00 |
| YPL036w | PMA2 | 0.00 |
| YGR227w | DIE2 | 0.00 |
| YCR010c | ADY2 | 0.00 |
| YGR217w | CCH1 | 0.00 |
| YJR092w | BUD4 | 0.00 |
| YGL010w | | 0.00 |
| YDR233c | RTN1 | 0.00 |
| YLL043w | FPS1 | 0.00 |
| YOR034c | AKR2 | 0.00 |
| YOR161c | PNS1 | 0.00 |
| YNL159c | ASI2 | 0.00 |
| YMR296c | LCB1 | 0.00 |
| YCL069w | | 0.00 |
| YPL176c | SSP134 | 0.00 |
| YPL058c | PDR12 | 0.00 |
| YNR019w | ARE2 | 0.00 |
| YML072c | TCB3 | 0.00 |
| YOR307c | SLY41 | 0.00 |
| YDR406w | PDR15 | 0.00 |
| YBR008c | FLR1 | 0.00 |
| YKR051w | | 0.00 |
| YIL030c | SSM4 | 0.00 |
| YLR342w | FKS1 | 0.00 |
| YHL003c | LAG1 | 0.00 |
| YER181c | | 0.00 |
| YOL081w | IRA2 | 0.00 |
| YKR067w | GPT2 | 0.00 |
| YOR301w | RAX1 | 0.00 |
| YBR024w | SCO2 | 0.00 |
| YER140w | | 0.00 |
| YOR086c | TCB1 | 0.00 |
| YOL002c | IZH2 | 0.00 |
| YKR103w | NFT1 | 0.00 |
| YKL212w | SAC1 | 0.00 |
| YCR087w | | 0.00 |
| YKR088c | TVP38 | 0.00 |
| YNL260c | | 0.00 |
| YNR056c | BIO5 | 0.00 |
| YDL054c | MCH1 | 0.00 |
| YPR198w | SGE1 | 0.00 |
| YDR196c | | 0.00 |
| YNR021w | | 0.00 |
| YFL048c | EMP47 | 0.00 |
| YLR452c | SST2 | 0.00 |

[0164] In order to evaluate the secretion abilities of the secretory signal peptides at low temperature, the culture temperature for the culture solution was lowered to 15° C., and culture was further continued at 15° C. for 72 hours. Thereafter, luminescence and absorbance were assayed by the luciferase activity assay technique, and the normalized activity values were also obtained.

[0165] The results are shown in Table 5. Table 5 shows the relative secretion efficiency of secretory signal peptides (indicated in terms of systematic and common names of the genes from which these secretory signal peptides have been derived) at low culture temperature (15° C.) in relation to the α-factor-derived secretory signal peptide. The secretory signal peptides used in conventional secretory expression systems are shaded. The result of assaying the secretion efficiency of the α-factor-derived secretory signal peptide is shown in the column indicated as “α-factor” in terms of common names. The result of assaying the secretion efficiency of the preprotoxin-derived secretory signal peptide is shown in the column indicated as “K28L” in terms of common gene name.

TABLE 5
Table 5: Secretion efficiency of each of secretory signal peptides
at low culture temperature (15° C.)

| | | Secretion |
|---|---|---|
| | | efficiency relative |
| | | to α-factor- |
| Systematic gene | Common gene | derived secretory |
| name | name | signal peptide |
| YBR243c | ALG7 | 5.76 |
| YNL237w | YTP1 | 5.67 |
| YCL043c | PDI1 | 5.61 |
| YKL096w | CWP1 | 5.55 |
| YBR078w | ECM33 | 5.17 |
| YLR250w | SSP120 | 5.05 |
| YEL001c | | 4.76 |
| YMR008c | PLB1 | 4.71 |
| YNL238w | KEX2 | 4.70 |
| YLR084c | RAX2 | 4.61 |
| YGR189c | CRH1 | 4.01 |
| YLR286c | CTS1 | 3.95 |
| YMR006c | PLB2 | 3.78 |
| YKL096w-a | CWP2 | 3.70 |
| YCR028c | FEN2 | 3.64 |
| YGL126w | SCS3 | 3.54 |
| YMR200w | ROT1 | 3.46 |
| YDR304c | CPR5 | 3.44 |
| YLR110c | CCW12 | 3.33 |
| YDR518w | EUG1 | 3.21 |
| YEL040w | UTR2 | 3.16 |
| YLR332w | MID2 | 3.00 |
| YDR056c | | 2.97 |
| YJL193w | | 2.83 |
| YHR139c | SPS100 | 2.76 |
| YGR014w | MSB2 | 2.69 |
| YPL234c | TFP3 | 2.59 |
| YGL032c | AGA2 | 2.58 |
| YDR057w | YOS9 | 2.56 |
| YDR055w | PST1 | 2.54 |
| YHR110w | ERP5 | 2.50 |
| YOL011w | PLB3 | 2.48 |
| YDR134c | | 2.47 |
| YBR296c | PHO89 | 2.42 |
| YDR144c | MKC7 | 2.37 |
| YDR077w | SED1 | 2.37 |
| YDR276c | PMP3 | 2.35 |
| YNL291c | MID1 | 2.35 |
| YAL058w | CNE1 | 2.32 |
| YLR300w | EXG1 | 2.31 |
| YIL140w | AXL2 | 2.30 |
| YBR187w | | 2.26 |
| YBR070c | SAT2 | 2.19 |
| YJR118c | ILM1 | 2.16 |
| YOR190w | SPR1 | 2.14 |
| YDR519w | FPR2 | 2.13 |
| YIL090w | | 2.13 |
| YER113c | | 2.06 |
| YDR261c | EXG2 | 2.05 |
| YDR420w | HKR1 | 2.04 |
| YFL051c | | 2.03 |
| YNL300w | TOS6 | 2.02 |
| YGL038c | OCH1 | 1.96 |
| YJL078c | PRY3 | 1.95 |
| YNL219c | ALG9 | 1.88 |
| YLR034c | SMF3 | 1.86 |
| YBR229c | ROT2 | 1.84 |
| YBR093c | PHO5 | 1.81 |
| YFL041w | FET5 | 1.77 |
| YJL174w | KRE9 | 1.70 |
| YHR143w | DSE2 | 1.67 |
| YNL327w | EGT2 | 1.66 |
| YOR008c | SLG1 | 1.66 |
| YER145c | FTR1 | 1.63 |
| YNL160w | YGP1 | 1.61 |
| YLR050c | | 1.57 |
| YGL089c | MF(ALPHA)2 | 1.57 |
| YER118c | SHO1 | 1.53 |
| YAR071w | PHO11 | 1.53 |
| YCR061w | | 1.53 |
| YKL187c | | 1.51 |
| YFL026w | STE2 | 1.48 |
| YNR067c | DSE4 | 1.47 |
| YIL039w | | 1.44 |
| YDR349c | YPS7 | 1.42 |
| YKL221w | MCH2 | 1.41 |
| YIL027c | KRE27 | 1.40 |
| YCL045c | | 1.38 |
| YOL105c | WSC3 | 1.37 |
| YEL027w | CUP5 | 1.35 |
| YNR044w | AGA1 | 1.35 |
| YMR119w | ASI1 | 1.34 |
| YLR390w-a | CCW14 | 1.32 |
| YLR207w | HRD3 | 1.31 |
| YCL027w | FUS1 | 1.30 |
| YNL283c | WSC2 | 1.24 |
| YLR120c | YPS1 | 1.23 |
| YLR413w | | 1.23 |
| YDR367w | | 1.22 |
| YAL007c | ERP2 | 1.22 |
| YKL209c | STE6 | 1.20 |
| YCR011c | ADP1 | 1.16 |
| YNL194c | | 1.14 |
| YHR181w | SVP26 | 1.14 |
| YPL130w | SPO19 | 1.14 |
| YEL004w | YEA4 | 1.13 |
| YNL190w | | 1.10 |
| YDR205w | MSC2 | 1.09 |
| YIL162w | SUC2 | 1.09 |
| YDR221w | | 1.04 |
| | α-factor | 1.00 |
| YJL051w | | 0.96 |
| YBR205w | KTR3 | 0.95 |
| YGL027c | CWH41 | 0.95 |
| YGR282c | BGL2 | 0.90 |
| YAL053w | | 0.86 |
| YBR092c | PHO3 | 0.85 |
| YPL189w | GUP2 | 0.85 |
| YCR017c | CWH43 | 0.81 |
| YJL222w | VTH2 | 0.80 |
| YIL015w | BAR1 | 0.79 |
| YJL159w | HSP150 | 0.78 |
| YPR124w | CTR1 | 0.76 |
| YBR042c | CST26 | 0.74 |
| YKL163w | PIR3 | 0.73 |
| YNR030w | ECM39 | 0.71 |
| YNL322c | KRE1 | 0.70 |
| YKR102w | FLO10 | 0.70 |
| YLR414c | | 0.70 |
| YEL002c | WBP1 | 0.70 |
| | K28L | 0.70 |
| YAR050w | FLO1 | 0.67 |
| YCR021c | HSP30 | 0.64 |
| YAL063c | FLO9 | 0.63 |
| YMR171c | | 0.63 |
| YBR210w | ERV15 | 0.63 |
| YPR091c | | 0.62 |
| YML012w | ERV25 | 0.61 |
| YLR087c | CSF1 | 0.61 |
| YDR534c | FIT1 | 0.61 |
| YFR041c | ERJ5 | 0.59 |
| YBR183w | YPC1 | 0.59 |
| YBR293w | | 0.59 |
| YJL002c | OST1 | 0.56 |
| YMR307w | GAS1 | 0.56 |
| YOR149c | SMP3 | 0.55 |
| YDL072c | YET3 | 0.54 |
| YLR121c | YPS3 | 0.53 |
| YIL147c | SLN1 | 0.51 |
| YLR214w | FRE1 | 0.51 |
| YKL051w | SFK1 | 0.50 |
| YGL020c | MDM39 | 0.48 |
| YLR155c | ASP3-1 | 0.48 |
| YDR536w | STL1 | 0.46 |
| YNL066w | SUN4 | 0.46 |
| YKL034w | TUL1 | 0.45 |
| YDL212w | SHR3 | 0.45 |
| YKL039w | PTM1 | 0.44 |
| YCR069w | CPR4 | 0.43 |
| YPL187w | MF(ALPHA)1 | 0.42 |
| YMR305c | SCW10 | 0.39 |
| YMR149w | SWP1 | 0.39 |
| YHR079c | IRE1 | 0.38 |
| YKL174c | | 0.36 |
| YGR213c | RTA1 | 0.35 |
| YML116w | ATR1 | 0.33 |
| YBR241c | | 0.33 |
| YJR004c | SAG1 | 0.33 |
| YCR034w | FEN1 | 0.32 |
| YGR279c | SCW4 | 0.32 |
| YKL220c | FRE2 | 0.32 |
| YKL164c | PIR1 | 0.32 |
| YOL013c | HRD1 | 0.31 |
| YEL036c | ANP1 | 0.31 |
| YLR037c | DAN2 | 0.31 |
| YDR245w | MNN10 | 0.31 |
| YJR150c | DAN1 | 0.29 |
| YOL019w | TOS7 | 0.28 |
| YGL028c | SCW11 | 0.27 |
| YLR459w | GAB1 | 0.26 |
| YDL093w | PMT5 | 0.26 |
| YCR044c | PER1 | 0.26 |
| YJL171c | | 0.26 |
| YBR301w | DAN3 | 0.26 |
| YNR018w | | 0.24 |
| YHR101c | BIG1 | 0.24 |
| YBR067c | TIP1 | 0.24 |
| YBR036c | CSG2 | 0.23 |
| YNL142w | MEP2 | 0.22 |
| YMR238w | DFG5 | 0.22 |
| YHL042w | | 0.22 |
| YGL139w | | 0.21 |
| YML038c | YMD8 | 0.21 |
| YJL158c | CIS3 | 0.20 |
| YGL255w | ZRT1 | 0.20 |
| YAL067c | SEO1 | 0.19 |
| YLR242c | ARV1 | 0.19 |
| YDR038c | ENA5 | 0.19 |
| YIR019c | MUC1 | 0.18 |
| YMR243c | ZRC1 | 0.18 |
| YBL017c | PEP1 | 0.18 |
| YOR011w | AUS1 | 0.17 |
| YBR199w | KTR4 | 0.17 |
| YOL030w | GAS5 | 0.18 |
| YER011w | TIR1 | 0.16 |
| YGL002w | ERP6 | 0.16 |
| YJR013w | GPI14 | 0.16 |
| YHR140w | | 0.16 |
| YMR058w | FET3 | 0.15 |
| YKL178c | STE3 | 0.15 |
| YOR085w | OST3 | 0.15 |
| YIL005w | EPS1 | 0.14 |
| YOR010c | TIR2 | 0.14 |
| YGL054c | ERV14 | 0.14 |
| YNR055c | HOL1 | 0.13 |
| YKL046c | DCW1 | 0.13 |
| YIL170w | HXT12 | 0.12 |
| YPR201w | ARR3 | 0.12 |
| YDR040c | ENA1 | 0.12 |
| YDL052c | SLC1 | 0.11 |
| YOR104w | PIN2 | 0.11 |
| YLL015w | BPT1 | 0.11 |
| YIR028w | DAL4 | 0.11 |
| YDL018c | ERP3 | 0.11 |
| YJL012c-a | | 0.10 |
| YKR040c | | 0.09 |
| YBR054w | YRO2 | 0.09 |
| YGL203c | KEX1 | 0.09 |
| YKL100c | | 0.08 |
| YHL035c | VMR1 | 0.08 |
| YJL094c | KHA1 | 0.08 |
| YBL089w | AVT5 | 0.07 |
| YIL013c | PDR11 | 0.07 |
| YHL036w | MUP3 | 0.07 |
| YLR237w | THI7 | 0.07 |
| YKR039w | GAP1 | 0.06 |
| YKL083w | | 0.06 |
| YDR072c | IPT1 | 0.06 |
| YJR040w | GEF1 | 0.06 |
| YDR384c | ATO3 | 0.06 |
| YEL043w | | 0.06 |
| YPL096c-a | ERI1 | 0.06 |
| YDR331w | GPI8 | 0.05 |
| YML123c | PHO84 | 0.05 |
| YDR033w | MRH1 | 0.05 |
| YEL065w | SIT1 | 0.05 |
| YHL016c | DUR3 | 0.05 |
| YER072w | VTC1 | 0.05 |
| YBR096w | | 0.04 |
| YDR046c | BAP3 | 0.04 |
| YKL004w | AUR1 | 0.04 |
| YBR021w | FUR4 | 0.04 |
| YDL210w | UGA4 | 0.04 |
| YLR220w | CCC1 | 0.04 |
| YBR004c | FMP44 | 0.04 |
| YKL065c | YET1 | 0.04 |
| YBR040w | FIG1 | 0.04 |
| YCL025c | AGP1 | 0.04 |
| YER053c-a | | 0.03 |
| YOR002w | ALG6 | 0.03 |
| YMR266w | RSN1 | 0.03 |
| YOL084w | PHM7 | 0.03 |
| YDR345c | HXT3 | 0.03 |
| YLL061w | MMP1 | 0.03 |
| YPL221w | BOP1 | 0.03 |
| YJR151c | DAN4 | 0.03 |
| YDR090c | | 0.03 |
| YJL062w | LAS21 | 0.03 |
| YPR138c | MEP3 | 0.03 |
| YAL018c | | 0.03 |
| YCL038c | ATG22 | 0.03 |
| YGR065c | VHT1 | 0.03 |
| YDL035c | GPR1 | 0.03 |
| YHR092c | HXT4 | 0.03 |
| YNL280c | ERG24 | 0.02 |
| YGL001c | ERG26 | 0.02 |
| YCR037c | PHO87 | 0.02 |
| YMR183c | SSO2 | 0.02 |
| YER056c | FCY2 | 0.02 |
| YLR138w | NHA1 | 0.02 |
| YGR197c | SNG1 | 0.02 |
| YDR011w | SNQ2 | 0.02 |
| YOR153w | PDR5 | 0.02 |
| YMR319c | FET4 | 0.02 |
| YBR069c | TAT1 | 0.02 |
| YKR105c | | 0.02 |
| YER060w-a | FCY22 | 0.02 |
| YGR026w | | 0.02 |
| YOR016c | ERP4 | 0.02 |
| YDR032c | PST2 | 0.02 |
| YDR343c | HXT6 | 0.02 |
| YER060w | FCY21 | 0.02 |
| YDL194w | SNF3 | 0.02 |
| YGL008c | PMA1 | 0.02 |
| YDR093w | DNF2 | 0.02 |
| YPL265w | DIP5 | 0.02 |
| YNR039c | ZRG17 | 0.02 |
| YDR342c | HXT7 | 0.02 |
| YNL318c | HXT14 | 0.02 |
| YDL245c | HXT15 | 0.02 |
| YHR096c | HXT5 | 0.02 |
| YNL145w | MFA2 | 0.02 |
| YFL011w | HXT10 | 0.02 |
| YJR158w | HXT16 | 0.02 |
| YBL042c | FUI1 | 0.02 |
| YHR094c | HXT1 | 0.02 |
| YNR013c | PHO91 | 0.02 |
| YDR126w | SWF1 | 0.02 |
| YNL268w | LYP1 | 0.02 |
| YPL092w | SSU1 | 0.01 |
| YBR298c | MAL31 | 0.01 |
| YBR038w | CHS2 | 0.01 |
| YKR053c | YSR3 | 0.01 |
| YDL247w | MPH2 | 0.01 |
| YBR068c | BAP2 | 0.01 |
| YIL120w | QDR1 | 0.01 |
| YNR019w | ARE2 | 0.01 |
| YHR149c | SKG6 | 0.01 |
| YEL017c-a | PMP2 | 0.01 |
| YMR011w | HXT2 | 0.01 |
| YCR023c | | 0.01 |
| YCL069w | | 0.01 |
| YLR081w | GAL2 | 0.01 |
| YER166w | DNF1 | 0.01 |
| YGL077c | HNM1 | 0.01 |
| YNL048w | ALG11 | 0.01 |
| YGR121c | MEP1 | 0.01 |
| YJL219w | HXT9 | 0.01 |
| YBR180w | DTR1 | 0.01 |
| YOL156w | HXT11 | 0.01 |
| YDR508c | GNP1 | 0.01 |
| YCR098c | GIT1 | 0.01 |
| YOL075c | | 0.01 |
| YPL232w | SSO1 | 0.01 |
| YGR260w | TNA1 | 0.01 |
| YLL052c | AQY2 | 0.01 |
| YNR072w | HXT17 | 0.01 |
| YGR055w | MUP1 | 0.01 |
| YOL092w | | 0.01 |
| YBR294w | SUL1 | 0.01 |
| YLR023c | IZH3 | 0.01 |
| YGL012w | ERG4 | 0.01 |
| YDR062w | LCB2 | 0.01 |
| YMR296c | LCB1 | 0.01 |
| YDL138w | RGT2 | 0.01 |
| YGR191w | HIP1 | 0.01 |
| YEL031w | SPF1 | 0.01 |
| YJL214w | HXT8 | 0.01 |
| YKR050w | TRK2 | 0.01 |
| YFL017c | GNA1 | 0.01 |
| YJR152w | DAL5 | 0.01 |
| YDL199c | | 0.01 |
| YKR106w | | 0.01 |
| YCR024c-a | PMP1 | 0.01 |
| YOL122c | SMF1 | 0.01 |
| YPL036w | PMA2 | 0.01 |
| YOR328w | PDR10 | 0.01 |
| YEL069c | HXT13 | 0.01 |
| YGR032w | GSC2 | 0.01 |
| YGL198w | YIP4 | 0.01 |
| YOL103w | ITR2 | 0.01 |
| YJL117w | PHO86 | 0.01 |
| YDR039c | ENA2 | 0.01 |
| YNL087w | TCB2 | 0.01 |
| YBR043c | QDR3 | 0.01 |
| YBR106w | PHO88 | 0.01 |
| YCR048w | ARE1 | 0.01 |
| YDR497c | ITR1 | 0.01 |
| YNL270c | ALP1 | 0.01 |
| YCR089w | FIG2 | 0.01 |
| YJR160c | MPH3 | 0.01 |
| YGR138c | TPO2 | 0.01 |
| YAL022c | FUN26 | 0.01 |
| YPL249c | GYP5 | 0.01 |
| YOL158c | ENB1 | 0.01 |
| YLR353w | BUD8 | 0.01 |
| YNL192w | CHS1 | 0.01 |
| YMR274c | RCE1 | 0.01 |
| YPR194c | OPT2 | 0.01 |
| YEL063c | CAN1 | 0.01 |
| YJL129c | TRK1 | 0.01 |
| YKL217w | JEN1 | 0.01 |
| YJR092w | BUD4 | 0.01 |
| YOR161c | PNS1 | 0.01 |
| YFL050c | ALR2 | 0.01 |
| YPR156c | TPO3 | 0.00 |
| YOL020w | TAT2 | 0.00 |
| YOR273c | TPO4 | 0.00 |
| YOL130w | ALR1 | 0.00 |
| YOR034c | AKR2 | 0.00 |
| YDR264c | AKR1 | 0.00 |
| YGR227w | DIE2 | 0.00 |
| YKR093w | PTR2 | 0.00 |
| YLL043w | FPS1 | 0.00 |
| YBR295w | PCA1 | 0.00 |
| YOR348c | PUT4 | 0.00 |
| YOR307c | SLY41 | 0.00 |
| YKR051w | | 0.00 |
| YDL123w | SNA4 | 0.00 |
| YGL084c | GUP1 | 0.00 |
| YGR281w | YOR1 | 0.00 |
| YBR041w | FAT1 | 0.00 |
| YPL274w | SAM3 | 0.00 |
| YLR342w | FKS1 | 0.00 |
| YDR294c | DPL1 | 0.00 |
| YBR140c | IRA1 | 0.00 |
| YPR003c | | 0.00 |
| YGL161c | YIP5 | 0.00 |
| YGR217w | CCH1 | 0.00 |
| YBR086c | IST2 | 0.00 |
| YOR086c | TCB1 | 0.00 |
| YHL003c | LAG1 | 0.00 |
| YFL055w | AGP3 | 0.00 |
| YER008c | SEC3 | 0.00 |
| YNL159c | ASI2 | 0.00 |
| YCR010c | ADY2 | 0.00 |
| YIL121w | QDR2 | 0.00 |
| YDR461w | MFA1 | 0.00 |
| YGL010w | | 0.00 |
| YPL058c | PDR12 | 0.00 |
| YPL176c | SSP134 | 0.00 |
| YML072c | TCB3 | 0.00 |
| YIL030c | SSM4 | 0.00 |
| YNL065w | AQR1 | 0.00 |
| YDR406w | PDR15 | 0.00 |
| YKR067w | GPT2 | 0.00 |
| YKR103w | NFT1 | 0.00 |
| YBR008c | FLR1 | 0.00 |
| YER181c | | 0.00 |
| YLL028w | TPO1 | 0.00 |
| YNL260c | | 0.00 |
| YKL212w | SAC1 | 0.00 |
| YNR056c | BIO5 | 0.00 |
| YBR132c | AGP2 | 0.00 |
| YJL093c | TOK1 | 0.00 |
| YBR023c | CHS3 | 0.00 |
| YIL047c | SYG1 | 0.00 |
| YOR301w | RAX1 | 0.00 |
| YKR088c | TVP38 | 0.00 |
| YDL054c | MCH1 | 0.00 |
| YOL002c | IZH2 | 0.00 |
| YER140w | | 0.00 |
| YOL081w | IRA2 | 0.00 |
| YDR196c | | 0.00 |
| YDR233c | RTN1 | 0.00 |
| YBR024w | SCO2 | 0.00 |
| YCR087w | | 0.00 |
| YLR452c | SST2 | 0.00 |
| YFL048c | EMP47 | 0.00 |
| YPR198w | SGE1 | 0.00 |
| YGR289c | MAL11 | 0.00 |
| YNR021w | | 0.00 |

[0166] As shown in Table 4 and in Table 5, the secretion abilities of the secretory signal peptides at each culture temperature were evaluated by assaying the activities of the secreted luciferase secreted outside the yeast cells. As a result, all the secretory signal peptides were found to exhibit luciferase activity in the yeast culture solution. Among the 440 types of secretory signal peptides, 9 types of secretory signal peptides and 51 types of secretory signal peptides, which would exhibit the secretory ability more than 2 times higher than that of the α-factor derived secretory signal peptide used in conventional effective secretory protein expression systems in yeast were newly identified at moderate culture temperature (30° C.) and at low culture temperature (15° C.), respectively. These identified secretory signal peptides included those derived from membrane proteins as well as those derived from secretory proteins.

### Example 5

### Evaluation of Secretion Ability of Secretory Signal Peptide in Relation to Other Proteins

[0167] In Example 4, the secretion ability of the secretory signal peptide was evaluated in terms of the secreted luciferase (mature CLuc). In Example 5, the secretion abilities of the 16 types of secretory signal peptides shown in Table 6 among the secretory signal peptides shown in Table 3 were evaluated in terms of secretory proteins, i.e., human pancreatic amylase (cDNA: SEQ ID NO: 1788; amino acid sequence: SEQ ID NO: 1789), for which a simple method for activity assay has been established, in order to inspect the efficacy of the secretory signal peptides in secretory expression of other proteins. Saccharomyces cerevisiae was used as a host.

[0168] Table 6 shows the secretory signal peptides used in Example 5 in terms of systematic and common names of the genes from which the secretory signal peptides have been derived. Table 6 also shows the nucleotide sequence of a synthetic primer (SEQ ID NO: shown in the right column) used for amplifying the gene region encoding each secretory signal peptide from the genomic DNA of Saccharomyces cerevisiae.

TABLE 6
Secretory signal peptides used in Example 6

| | Systematic gene | Common gene | | SEQ | | SEQ |
|---|---|---|---|---|---|---|
| | name | name | Synthetic primer (Forward) | ID NO: | Synthetic primer (Reverse) | ID NO: |
| 1 | YCR028c | FEN2 | ATGATGAAGGAATCGAAATCTATCAC | 1790 | gggGGTCAAATCGTTTCCGACCAT | 1791 |
| 2 | YDR420w | HKR1 | ATGGTCTCATGAAAATAAAAAAAATTT | 1792 | gggTTGCGTTGTCGTCGTCACA | 1793 |
| 3 | YGR014w | MSB2 | ATGCAGTTTCCATTCGCTTG | 1794 | gggTGACACAGAAGTCTGGGAAGTGG | 1795 |
| 4 | YBR187w | | ATGGGAAATATGATAAAGAAGGCA | 1796 | gggAGACTTCAAATGTGAAGAACTCCCAG | 1797 |
| 5 | YBR296c | PHO89 | ATGGCTTTACATCAATTTGACTATATTT | 1798 | gggAGATCTAGAAGAGATCGACGACG | 1799 |
| 6 | YCR061w | | ATGGTGCGTTTTGTTTCAATTT | 1800 | gggAGACCTATTCCCAGCCTGTGTA | 1801 |
| 7 | YNL237w | YPT1 | ATGACAGCAGCTAATAAGAATATTGTCT | 1802 | gggAGATTTCGACCCAGCCTGCA | 1803 |
| 8 | YBR078w | ECM33 | ATGCAATTCAAGAACGCTTTG | 1804 | gggGATTTTCTTGATAGAGTCAGCGG | 1805 |
| 9 | YLR084c | RAX2 | ATGTTTGTTCATCGTCTCTGGAC | 1806 | gggATCATCAGAGGCATCTTCCAAC | 1807 |
| 10 | YNL300w | TOS6 | ATGAAATTCTCTACTCTCTCCACCG | 1808 | gggTGTGCTGATCTCATGGGTGGT | 1809 |
| 11 | YBR243c | ALG7 | ATGTTGCGACTTTTTTCACTGG | 1810 | gggTGCTATACCAAATCCCAGGG | 1811 |
| 12 | YGL126w | SCS3 | ATGTCTAGCAAATGGTTTAATGCTATAC | 1812 | gggCCCTTTCTTTACCAACATAGCATTT | 1813 |
| 13 | YMR008c | PLB1 | ATGAAGTTGCAGAGTTTGTTGGTT | 1814 | gggCTCCTTGGTGTATGCATCTCTTTT | 1815 |
| 14 | YHR139c | SPS100 | ATGAAATTCACATCAGTGCT | 1816 | gggGGAAGACGATTCGCTTTGTA | 1817 |
| 15 | YKL096w | CWP1 | ATGAAATTCTCCACTGCTTTGTC | 1818 | gggATCGCTCTCAGAACCTTCTTTG | 1819 |
| 16 | YCL043c | PDI1 | ATGAAGTTTTCTGCTGGTGCC | 1820 | gggGTCGTGCGACTGAATGTACTCATT | 1821 |

[0169] In order to introduce the gene regions encoding the aforementioned 16 types of secretory signal peptides into the pLTex321sV5H low-temperature-inducible expression vector prepared in Example 2, the gene regions were first amplified via PCR from the genomic DNA of Saccharomyces cerevisiae. The synthetic primers for the gene regions are shown in Table 6. Each reverse primer comprises at its 5′ end a 3-nucleotide (GGG) sequence of the SmaI cleavage site. Inclusion of such sequence in each reverse primer results in the generation of each DNA fragment encoding secretory signal peptides obtained by PCR described below. Introduction of the resulting DNA fragment into the SmaI-cleaved pLTex321sV5H vector results in the regeneration of the SmaI cleavage site.

[0170] PCR was carried out using 50 μl of a reaction solution comprising 300 nM of each primer, 1 mM MgSO₄, 200 μM dNTP, 1 ng of the yeast genomic DNA, and 1× buffer and KOD-Plus-1U included in the KOD-Plus-. The PCR cycle comprised: the first step at 94° C. for 2 minutes; 35 cycles of the second step at 94° C. for 15 seconds (denaturation), at 50° C. for 30 seconds (annealing), and at 68° C. for 1 minute (elongation); and the third step at 68° C. for 5 minutes. In order to add a phosphate group to the 5′ ends of the DNA fragments obtained via PCR, DNA fragments were phosphorylated using 100 μl of a reaction solution comprising 1× buffer included in T4 Polynucleotide Kinase (TOYOBO), 1 mM of ATP, and 20 U of T4 Polynucleotide Kinase at 37° C. for 1 hour.

[0171] Thereafter, the DNA fragments were fractionated via agarose gel electrophoresis, and DNA fragments each having a chain length of interest were obtained. Among the 16 obtained types of DNA fragments, DNA fragments encoding secretory signal peptides derived from the YGRO14w gene and the YBRO78w gene contained the SmaI cleavage site and the XhoI cleavage site. Thus, the other 14 types of DNA fragments were designated as DNA fragments J, and DNA fragments encoding 2 types of secretory signal peptides derived from the YGRO14w gene and the YBRO78w gene were designated as DNA fragments K. These DNA fragments were used to construct expression plasmids containing the genes encoding fusion proteins of secretory signal peptides with mature α-amylase (a protein consisting of an amino acid sequence derived from the amino acid sequence of human pancreatic α-amylase as shown in SEQ ID NO: 1789 by deletion of the secretory signal peptide consisting of amino acids 1 to 15) in the following manner.

[0172] The pLTex321sV5H low-temperature-inducible expression vector was cleaved with SmaI, the resulting DNA fragments were subjected to the reaction using 100 μl of a reaction solution containing 1× buffer and 2 U of E. coli Alkaline Phosphatase included in E. coli Alkaline Phosphatase (TOYOBO) at 60° C. for 30 minutes, and a DNA fragment lacking a phosphate group at its 5′ end was obtained. The resultant is referred to as DNA fragment L.

[0173] Subsequently, DNA fragments J were ligated to DNA fragments L using the DNA Ligation Kit ver. 2.1, and the ligation products were introduced into E. coli DH5α. The resulting transformants were cultured overnight, plasmids were extracted using the GenElute Plasmid Miniprep Kit, and transformants having plasmids of interest (expression vectors) were identified based on the restriction enzyme cleavage patterns and via nucleotide sequence analysis. Expression vectors into which the gene regions encoding 14 types of secretory signal peptides have been introduced were prepared from these transformants. Further, the resulting expression vectors were cleaved with SmaI and with XhoI, the DNA fragments were fractionated via agarose gel electrophoresis, and the DNA fragments of interest were obtained. These fragments are designated as DNA fragments M.

[0174] The gene region encoding mature α-amylase that contains no secretory signal peptide was amplified via PCR from a plasmid containing the gene (AMY2A, cDNA: SEQ ID NO: 1788) encoding human pancreatic α-amylase.

[0175] The following synthetic primers were used. hAMY2A ORF F−Sig consists of a 25-bp region encompassing the 5′ end of the gene region encoding mature α-amylase. hAMY2A ORF R+XhoI comprises at its 5′ end the XhoI cleavage site, and downstream thereof, a sequence complementary to a 27-bp region including the termination cordon of the gene region encoding human pancreatic α-amylase.

[0176] hAMY2A ORF F−Sig: CAGTATTCCCCAAATACACAACAAG(SEQ ID NO: 1822)

[0177] hAMY2A ORF R+XhoI: GCGC-CTCGAG-TTACAATTTAGATTCAGCATGAATTGC (SEQ ID NO: 1823)

[0178] PCR was carried out using 50 μl of a reaction solution comprising 300 nM of each primer, 1 mM MgSO₄, 200 μM dNTP, 1 ng of plasmid containing the gene encoding human pancreatic α-amylase (AMY2A), and 1× buffer and KOD-Plus-1U included in the KOD-Plus-. The PCR cycle comprised: the first step at 94° C. for 2 minutes; 35 cycles of the second step at 94° C. for 15 seconds (denaturation), at 50° C. for 30 seconds (annealing), and at 68° C. for 2 minutes (elongation); and the third step at 68° C. for 5 minutes.

[0179] The resulting PCR product was cleaved with XhoI, the DNA fragments were fractionated via agarose gel electrophoresis, and the DNA fragment of interest (approximately 1.5 kbp) was obtained. This fragment is referred to as DNA fragment N.

[0180] Subsequently, DNA fragments M were ligated to DNA fragments N using the DNA Ligation Kit ver. 2.1, and the ligation products were introduced into E. coli DH5α. The resulting transformants were cultured overnight, plasmids were extracted using the GenElute Plasmid Miniprep Kit, and transformants having plasmids (expression vectors) containing the genes encoding the fusion proteins of the secretory signal peptides with mature α-amylase were identified based on the restriction enzyme cleavage patterns and via nucleotide sequence analysis. Expression vectors for 14 types of fusion proteins (of secretory signal peptides with mature α-amylase) were prepared from the resulting transformants.

[0181] The expression vector for a fusion protein (a fusion protein of a secretory signal peptide with mature α-amylase) was prepared using the secretory signal peptides derived from the YGRO14w gene and the YBRO78w gene in the following manner.

[0182] The gene region encoding mature α-amylase was amplified via PCR using synthetic primers, hAMY2A ORF F−Sig+SmaI and the aforementioned hAMY2A ORF R+XhoI (SEQ ID NO: 1823).

[0183] The sequence of the synthetic primer used, hAMY2A ORF F−Sig+SmaI, is as shown below. hAMY2A ORF F−Sig+SmaI comprises at its 5′ end a 3-nucleotide (GGG) sequence of the SmaI cleavage site, and downstream thereof, a 25-bp region encompassing the 5′ end of the gene region encoding mature α-amylase.

[0184] hAMY2A ORF F−Sig+SmaI: GGG-CAGTATTCCCCAAATACACAACAAG (SEQ ID NO: 1824)

[0185] PCR was carried out using 50 μl of a reaction solution comprising 300 nM of each primer, 1 mM MgSO₄, 200 μM dNTP, 1 ng of plasmid containing the gene encoding human pancreatic α-amylase (AMY2A), and 1× buffer and KOD-Plus-1U included in the KOD-Plus-. The PCR cycle comprised: the first step at 94° C. for 2 minutes; 35 cycles of the second step at 94° C. for 15 seconds (denaturation), at 50° C. for 30 seconds (annealing), and at 68° C. for 2 minutes (elongation); and the third step at 68° C. for 5 minutes. The resulting PCR product was cleaved with XhoI, the DNA fragments were fractionated via agarose gel electrophoresis, and the DNA fragments of interest (approximately 1.5 kbp) were obtained. These fragments are referred to as DNA fragments O.

[0186] The pLTex321sV5H low-temperature-inducible expression vector was cleaved with SmaI and XhoI, the DNA fragments were fractionated via agarose gel electrophoresis, and the DNA fragments of interest (approximately 7.4 kbp) were obtained. These fragments are referred to as DNA fragments P.

[0187] Subsequently, DNA fragments O were ligated to DNA fragments P using the DNA Ligation Kit ver. 2.1, and the ligation products were introduced into E. coli DH5α. The resulting transformants were cultured overnight, plasmids were extracted using the GenElute Plasmid Miniprep Kit, and transformants having plasmids of interest were identified based on the restriction enzyme cleavage patterns and via nucleotide sequence analysis. Plasmids were prepared from the transformants. The resulting plasmids were cleaved with SmaI, and the DNA fragments were subjected to a reaction using 100 μl of a reaction solution containing 1× buffer and 2 U of E. coli Alkaline Phosphatase included in E. coli Alkaline Phosphatase at 60° C. for 30 minutes. Thus, a DNA fragment from which a phosphate group at its 5′ end had been removed was obtained. Such a fragment is referred to as DNA fragment Q.

[0188] Further, DNA fragments K were ligated to DNA fragments Q using the DNA Ligation Kit ver. 2.1, and the ligation products were introduced into E. coli DH5α. The resulting transformants were cultured overnight, plasmids were extracted using the GenElute Plasmid Miniprep Kit, and transformants having plasmids (expression vectors) containing the genes encoding the fusion proteins of the secretory signal peptides with mature α-amylase were identified based on the restriction enzyme cleavage patterns and via nucleotide sequence analysis. Expression vectors for 2 types of fusion proteins (of secretory signal peptides with mature α-amylase) were prepared from the resulting transformants.

[0189] As the controls, expression vectors for the fusion proteins (a fusion protein of a secretory signal peptide with mature α-amylase) utilizing the α-factor-derived secretory signal peptide or preprotoxin (K28 prepro-toxin)-derived secretory signal peptide described in Example 3 were prepared in the following manner.

[0190] The gene region encoding the α-factor-derived secretory signal peptide was amplified via PCR from the pCLuRA plasmid (see International Patent Application No. PCT/JP2006/311597, claiming the priority right of JP Patent Application No. 2005-169768).

[0191] The following synthetic primers were used. MF(ALPHA)1 Sig. 89aa F comprises a 26-bp region encompassing the 5′ end of the gene region encoding the α-factor-derived secretory signal peptide. MF(ALPHA)1 Sig. 89aa R+SmaI comprises at its 5′ end a 3-nucleotide (GGG) sequence of the SmaI cleavage site, and downstream thereof, a sequence complementary to a 22-bp region encompassing the 3′ end of the gene region encoding the α-factor-derived secretory signal peptide.

[0192] MF(ALPHA)1 Sig. 89aa F: ATGAGATTTCCTTCAATTTTTACTGC (SEQ ID NO: 1825)

[0193] MF(ALPHA)1 Sig. 89aa R+SmaI: GGG-AGCTTCAGCCTCTCTTTTCTCG (SEQ ID NO: 1826)

[0194] PCR was carried out using 50 μl of a reaction solution comprising 300 nM of each primer, 1 mM MgSO₄, 200 μM dNTP, 1 ng of the pCLuRA plasmid, and 1× buffer and KOD-Plus-1U included in the KOD-Plus-. The PCR cycle comprised: the first step at 94° C. for 2 minutes; 35 cycles of the second step at 94° C. for 15 seconds (denaturation), at 50° C. for 30 seconds (annealing), and at 68° C. for 1 minute (elongation); and the third step at 68° C. for 5 minutes. The resulting DNA fragments were subjected to a reaction using 100 μl of a reaction solution comprising 1× buffer, 1 mM of ATP, and 20 U of T4 polynucleotide kinase included in T4 polynucleotide kinase at 37° C. for 1 hour. Thus, a phosphate group was added to the 5′ end of the DNA fragment.

[0195] Thereafter, the DNA fragments were fractionated via agarose gel electrophoresis, and the DNA fragments of interest (270 bp) were obtained. These fragments are referred to as DNA fragments R.

[0196] Subsequently, DNA fragments R were ligated to DNA fragments L using the DNA Ligation Kit ver. 2.1, and the ligation products were introduced into E. coli DH5α. The resulting transformants were cultured overnight, plasmids were extracted using the GenElute Plasmid Miniprep Kit, and transformants having plasmids of interest (expression vectors) were identified based on the restriction enzyme cleavage patterns and via nucleotide sequence analysis. The expression vector (pLTex321sV5Hα) into which the gene region encoding the α-factor-derived secretory signal peptide had been introduced was prepared from the transformant.

[0197] The gene regions encoding mature α-amylase were introduced into the pLTex321sV5Hα expression vector comprising the gene region encoding the α-factor-derived secretory signal peptide and the pLTex321sV5H K28L expression vector comprising the gene region encoding the preprotoxin-derived secretory signal peptide prepared in Example 2 in the following manner.

[0198] These expression vectors were each cleaved with SmaI and XhoI, the DNA fragments were fractionated via agarose gel electrophoresis, and the DNA fragments of interest were obtained. The resulting DNA fragments were ligated to DNA fragments N using the DNA Ligation Kit ver. 2.1, and the ligation products were introduced into E. coli DH5α. The resulting transformants were cultured overnight, plasmids were extracted using the GenElute Plasmid Miniprep Kit, and transformants having plasmids (expression vectors) containing the genes encoding the fusion proteins of the secretory signal peptides with mature α-amylase were identified based on the restriction enzyme cleavage patterns and via nucleotide sequence analysis. Expression vectors for 2 types of fusion proteins (of secretory signal peptides with mature α-amylase) were prepared from the resulting transformants.

[0199] Using the expression vector containing the gene encoding each of the 16 types of fusion proteins of secretory signal peptides with mature α-amylase obtained via the above procedure shown in Table 6 and the control vectors, i.e., an expression vector comprising a gene encoding the fusion protein of the α-factor-derived secretory signal peptide with mature α-amylase and an expression vector containing a gene encoding the fusion protein of preprotoxin (K28 prepro-toxin)-derived secretory signal peptide with mature α-amylase, the Saccharomyces cerevisiae BY4743 PEP4Δ PRB1Δ strain was transformed using the EZ yeast transformation kit (Qbiogene), and transformants each sustaining a relevant expression vector were obtained using SD+HL plate medium (0.67% of yeast nitrogen base without amino acid, 2% of glucose, 0.002% of L-histidine HCl, 0.01% of L-leucine, and 2% of agar).

[0200] In order to evaluate the levels of secretory expression of human pancreatic α-amylase in the resulting transformants, the following experiment was carried out.

[0201] One ml of SD+HL+PPB medium was inoculated with the resulting transformants, and preculture was conducted at 30° C. for 3 days. Part of the culture preculture solution was used in the following culture.

[0202] Subsequently, one ml of SD+HL+PPB medium was inoculated with the culture solution (10 μl) obtained via the preculture and culture was conducted at 30° C. to the logarithmic growth phase. Thereafter, the culture temperature for the culture solution was lowered to 10° C., and culture was further continued at 10° C. for 168 hours.

[0203] After the culture had been conducted at a low temperature for 168 hours, the activity of human pancreatic α-amylase secreted in the culture solution was assayed to evaluate the secretion levels of the transformants. The human pancreatic α-amylase activity was assayed using 5 μl of the supernatant of the culture solution and the amylase assay reagent (Diacolor Liquid AMY, Ono Pharmaceutical Co., Ltd.). Simultaneously, 200 μl of the culture solution was used to assay the absorbance thereof at 600 nm, and the activity value was divided by the assayed value to normalize the human pancreatic α-amylase activity value based on the absorbance.

[0204] The results are shown in Table 7. Table 7 shows the secretory expression levels of human pancreatic α-amylase when using secretory signal peptides used in conventional expression systems in yeast (α-factor-derived secretory signal peptide and preprotoxin (K28 prepro-toxin)-derived secretory signal peptide) and the 16 types of secretory signal peptides found in Example 1 in terms of the secretion efficiency, in relation to the secretory expression levels resulting from the use of the α-factor-derived secretory signal peptide. In Table 7, each secretory signal peptide is indicated in terms of the systematic and common names of the genes from which the secretory signal peptides are derived. The result of the α-factor-derived secretory signal peptide is shown in the column indicated as “α-factor” in terms of common name. The result of preprotoxin-derived secretory signal peptide is shown in the column indicated as “K28L” in terms of common name.

TABLE 7

Results of secretory expression of human
pancreatic α-amylase using each of secretory
signal peptides

| | | |
|---|---|---|
| | | Secretion |
| | | efficiency relative to α- |
| Systematic | Common | factor-derived secretory |
| gene name | gene name | signal peptide |

| | | | |
|---|---|---|---|
| 1 | YCR028c | FEN2 | 9.46 |
| 2 | YDR420w | HKR1 | 28.25 |
| 3 | YGR014w | MSB2 | 8.31 |
| 4 | YBR187w | | 29.98 |
| 5 | YBR296c | PHO89 | 8.08 |
| 6 | YCR061w | | 5.90 |
| 7 | YNL237w | YTP1 | 29.89 |
| 8 | YBR078w | ECM33 | 16.68 |
| 9 | YLR084c | RAX2 | 6.22 |
| 10 | YNL300w | TOS6 | 49.16 |
| 11 | YBR243c | ALG7 | 11.30 |
| 12 | YGL126w | SCS3 | 8.93 |
| 13 | YMR008c | PLB1 | 39.68 |
| 14 | YHR139c | SPS100 | 27.42 |
| 15 | YKL096w | CWP1 | 11.73 |
| 16 | YCL043c | PDI1 | 8.45 |
| 17 | | α-factor | 1.00 |
| 18 | | K28L | 0.02 |

[0205] As shown in Table 7, 16 types of secretory signal peptides were used to inspect the secretory expression of human pancreatic α-amylase. As a result, with the use of any secretory signal peptide, these secretory signal peptides were found to exhibit higher secretory expression levels than α-factor-derived secretory signal peptide and preprotoxin-derived secretory signal peptide that had been used in the highly efficient secretory protein expression in conventional expression systems in yeast.

### EFFECTS OF THE INVENTION

[0206] The present invention provides secretory signal peptides exhibiting higher ability for transportation to cell organelles, including cell membranes, endoplasmic reticulum, and Golgi bodies, and higher efficiency of extracellular secretion, than conventional secretory signal peptides that can be used for membrane and secretory protein expression systems, for example.

[0207] All publications, patents, and patent applications cited herein are incorporated herein by reference in their entirety.

1. DNA encoding the following secretory signal peptide (a) or (b):
(a) a secretory signal peptide consisting of the amino acid sequence as shown in any one of SEQ ID NO: 2, 4, 6, 8, 10, 12, 14, 16, and 18; or
(b) a secretory signal peptide consisting of an amino acid sequence derived from the amino acid sequence of the secretory signal peptide (a) by deletion, substitution, or addition of one or several amino acids and having secretory signal activity at 30° C.

2. DNA according to claim 1, wherein said DNA is any one of the following DNA (a) to (c) encoding a secretory signal peptide:
(a) DNA consisting of the nucleotide sequence as shown in any one of SEQ ID NO: 1, 3, 5, 7, 9, 11, 13, 15, and 17;
(b) DNA consisting of a nucleotide sequence derived from DNA (a) by deletion, substitution, or addition of one or several nucleotides and encoding a secretory signal peptide having secretory signal activity at 30° C.; and
(c) DNA hybridizing under stringent conditions with DNA consisting of a nucleotide sequence complementary to DNA (a) and encoding a secretory signal peptide having secretory signal activity at 30° C.

3. A secretory signal peptide encoded by DNA according to claim 1 or 2.

4. An expression vector comprising DNA according to claim 1 or 2 and a foreign gene.

5. A transformant transformed by the expression vector according to claim 4.

6. The transformant according to claim 5, wherein the host is yeast.

7. The transformant according to claim 6, wherein the yeast is Saccharomyces cerevisiae.

8. A method for producing a protein, wherein the transformant according to any one of claims 5 to 7 is cultured at 20° C. to 42° C.

9. DNA encoding the following secretory signal peptide (a) or (b):
(a) a secretory signal peptide consisting of the amino acid sequence as shown in any one of SEQ ID NO: 2, 4, 6, 8, 10, 12, 14, 16, 18, 20, 22, 24, 26, 28, 30, 32, 34, 36, 38, 40, 42, 44, 46, 48, 50, 52, 54, 56, 58, 60, 62, 64, 66, 68, 70, 72, 74, 76, 78, 80, 82, 84, 86, 88, 90, 92, 94, 96, 98, 100, and 102; or
(b) a secretory signal peptide consisting of an amino acid sequence derived from the amino acid sequence of the secretory signal peptide (a) by deletion, substitution, or addition of one or several amino acids and having secretory signal activity at 15° C.

10. DNA according to claim 9, wherein said DNA is any one of the following DNA (a) to (c) encoding a secretory signal peptide:
(a) DNA consisting of the nucleotide sequence as shown in any one of SEQ ID NO: 1, 3, 5, 7, 9, 11, 13, 15, 17, 19, 21, 23, 25, 27, 29, 31, 33, 35, 37, 39, 41, 43, 45, 47, 49, 51, 53, 55, 57, 59, 61, 63, 65, 67, 69, 71, 73, 75, 77, 79, 81, 83, 85, 87, 89, 91, 93, 95, 97, 99, and 101;
(b) DNA consisting of a nucleotide sequence derived from DNA (a) by deletion, substitution, or addition of one or several nucleotides and encoding a secretory signal peptide having secretory signal activity at 15° C.; and
(c) DNA hybridizing under stringent conditions with DNA consisting of a nucleotide sequence complementary to DNA (a) and encoding a secretory signal peptide having secretory signal activity at 15° C.

11. A secretory signal peptide encoded by DNA according to claim 9 or 10.

12. An expression vector comprising DNA according to claim 9 or 10 and a foreign gene.

13. A transformant transformed by the expression vector according to claim 12.

14. The transformant according to claim 13, wherein the host is yeast.

15. The transformant according to claim 14, wherein the yeast is Saccharomyces cerevisiae.

16. A method for producing a protein, wherein the transformant according to any one of claims 13 to 15 is cultured at 0° C. to 20° C.

The application's sequence listing, which the Patent Office published only in electronic form, follows.

SEQUENCE LISTING (1826 sequences)

SEQ ID NO: 1 - DNA, 300 bp, Saccharomyces cerevisiae
atggtctcattgaaaataaaaaaaattttactcctggtgtcattgttaaatgcaatcgaggcctatagtaacgatacaatatattcaacttcatacaataatggaatagaaagcacaccctcatattcaacatccgcgatatccagtaccggatctagcaacaaagagaatgcaataacatcaagctctgaaaccaccacaatggctggccaatatggtgaaagtggaagcacaacaataatggatgaacaagaaactggtacgtccagccagtatattagtgtgacgacgacaacgcaa

SEQ ID NO: 2 - protein, 100 aa, Saccharomyces cerevisiae
MVSLKIKKILLLVSLLNAIEAYSNDTIYSTSYNNGIESTPSYSTSAISSTGSSNKENAITSSSETTTMAGQYGESGSTTIMDEQETGTSSQYISVTTTTQ

SEQ ID NO: 3 - DNA, 123 bp, Saccharomyces cerevisiae
atgggaaatatgataaagaaggcatctttaatagccctcctaccgctgttcaccgccgcagccgctgcagctactgatgcggagacatctatggaatctgggagttcttcacatttgaagtct

SEQ ID NO: 4 - protein, 41 aa, Saccharomyces cerevisiae
MGNMIKKASLIALLPLFTAAAAAATDAETSMESGSSSHLKS

SEQ ID NO: 5 - DNA, 153 bp, Saccharomyces cerevisiae
atgtctagcaaatggtttaatgctatacacctactggtgtgcccgttgacggtactggtaggatatctcatgaacgcgtatggctacggtgcggcgctgcaagcaaccctgaataaggatggtctggtaaatgctatgttggtaaagaaaggg

SEQ ID NO: 6 - protein, 51 aa, Saccharomyces cerevisiae
MSSKWFNAIHLLVCPLTVLVGYLMNAYGYGAALQATLNKDGLVNAMLVKKG

SEQ ID NO: 7 - DNA, 255 bp, Saccharomyces cerevisiae
atgaaattcacatcagtgctagcattttttcttgcaactttaacagcttctgcaacaccactttacaagaggcagaacgttacttctggcggcggtacggtccccgtgatcatcacgggtggacctgctgtatctggtagccagtcaaacgttactaccacaacgctattcaactctacttccaccttaaacatcactcaactttaccaaattgctactcaagttaatcagactttacaaagcgaatcgtcttcc

SEQ ID NO: 8 - protein, 85 aa, Saccharomyces cerevisiae
MKFTSVLAFFLATLTASATPLYKRQNVTSGGGTVPVIITGGPAVSGSQSNVTTTTLFNSTSTLNITQLYQIATQVNQTLQSESSS

SEQ ID NO: 9 - DNA, 300 bp, Saccharomyces cerevisiae
atgcagtttccattcgcttgtctcctatcgacccttgtaattagtgggtcattggcccgggccagccccttcgactttatattcggcaatggaacgcaacaagctcagagccaaagcgagagtcaaggtcaagtttctttcaccaatgaagcttctcaggatagttccaccacctctttggtaacagcctattctcaaggtgttcattcgcaccagtctgcaacaatagtgagtgccacaatctcttccctcccatctacttggtatgatgcgagctccacttcccagacttctgtgtca

SEQ ID NO: 10 - protein, 100 aa, Saccharomyces cerevisiae
MQFPFACLLSTLVISGSLARASPFDFIFGNGTQQAQSQSESQGQVSFTNEASQDSSTTSLVTAYSQGVHSHQSATIVSATISSLPSTWYDASSTSQTSVS

SEQ ID NO: 11 - DNA, 291 bp, Saccharomyces cerevisiae
atgcaattcaagaacgctttgactgctactgctattctaagtgcctccgctctagctgctaactcaactacttctattccatcttcatgtagtattggtacttctgccactgctactgctcaagctgatttggacaaaatctccggttgtagtaccattgttggtaacttgaccatcaccggtgacttgggttccgctgctttggctagtatccaagagattgatggttccttgactatcttcaactccagttctttatcttctttctccgctgactctatcaagaaaatc

SEQ ID NO: 12 - protein, 97 aa, Saccharomyces cerevisiae
MQFKNALTATAILSASALAANSTTSIPSSCSIGTSATATAQADLDKISGCSTIVGNLTITGDLGSAALASIQEIDGSLTIFNSSSLSSFSADSIKKI

SEQ ID NO: 13 - DNA, 231 bp, Saccharomyces cerevisiae
atgaaattctctactctctccaccgttgctgccattgccgcatttgcttccgcagattccacctctgatggtgtcacttacgtagatgttaccaccaccccacaaagtactacatctatggtctccaccgtgaaaactacttccactccatacactacaagtaccattgccactctatccactaaatctatcagtagccaagctaacaccaccacccatgagatcagcaca

SEQ ID NO: 14 - protein, 77 aa, Saccharomyces cerevisiae
MKFSTLSTVAAIAAFASADSTSDGVTYVDVTTTPQSTTSMVSTVKTTSTPYTTSTIATLSTKSISSQANTTTHEIST

SEQ ID NO: 15 - DNA, 300 bp, Saccharomyces cerevisiae
atgtttgttcatcgtctctggacactcgcatttccttttcttgtggagatatcgaaggcatcacagttggagaatattaaatctcttctggacatcgaagataatgtgctaccgaatttgaatatatcgcaaaataatagcaacgcagtacaaatcctcgggggtgtggacgccttatctttttacgagtacacaggccaacaaaatttcactaaagaaataggtccagaaacaagctcacatggattagtttattactctaacaacacctatatccagttggaagatgcctctgatgat

SEQ ID NO: 16 - protein, 100 aa, Saccharomyces cerevisiae
MFVHRLWTLAFPFLVEISKASQLENIKSLLDIEDNVLPNLNISQNNSNAVQILGGVDALSFYEYTGQQNFTKEIGPETSSHGLVYYSNNTYIQLEDASDD

SEQ ID NO: 17 - DNA, 198 bp, Saccharomyces cerevisiae
atgaagttgcagagtttgttggtttctgctgcagttttgacttctctaacagagaacgttaacgcttggtcaccaaataacagttacgtccctgcgaacgtaacctgtgatgatgatattaacttagtcagagaagcatctggtttgtcagataacgaaacagaatggctgaaaaaaagagatgcatacaccaaggag

SEQ ID NO: 18 - protein, 66 aa, Saccharomyces cerevisiae
MKLQSLLVSAAVLTSLTENVNAWSPNNSYVPANVTCDDDINLVREASGLSDNETEWLKKRDAYTKE

SEQ ID NO: 19 - DNA, 102 bp, Saccharomyces cerevisiae
atgttgcgacttttttcactggcacttatcacatgcttaatctactattccaaaaatcagggcccatctgctcttgttgcggccgtgggatttggtatagca

SEQ ID NO: 20 - protein, 34 aa, Saccharomyces cerevisiae
MLRLFSLALITCLIYYSKNQGPSALVAAVGFGIA

SEQ ID NO: 21 - DNA, 171 bp, Saccharomyces cerevisiae
atgacagcagctaataagaatattgtcttcggattttccagatccattagcgcaattctactaatatgctttttctttgaaaaagtctgcggtgatatggagcatgatatgggcatggatgatacttcgggatacacgaggccagaaattgtgcaggctgggtcgaaatct

SEQ ID NO: 22 - protein, 57 aa, Saccharomyces cerevisiae
MTAANKNIVFGFSRSISAILLICFFFEKVCGDMEHDMGMDDTSGYTRPEIVQAGSKS

SEQ ID NO: 23 - DNA, 150 bp, Saccharomyces cerevisiae
atgaagttttctgctggtgccgtcctgtcatggtcctccctgctgctcgcctcctctgttttcgcccaacaagaggctgtggcccctgaagactccgctgtcgttaagttggccaccgactccttcaatgagtacattcagtcgcacgac

SEQ ID NO: 24 - protein, 50 aa, Saccharomyces cerevisiae
MKFSAGAVLSWSSLLLASSVFAQQEAVAPEDSAVVKLATDSFNEYIQSHD

SEQ ID NO: 25 - DNA, 270 bp, Saccharomyces cerevisiae
atgaaattctccactgctttgtctgtcgctttattcgccttggctaagatggtcattgccgattccgaagaattcggcctggtgagtatccgttccggctcggatttacaatacttgagtgtttacagtgataacggcactttgaaacttggcagcggtagtggctcatttgaggcaactattaccgatgacggtaaactgaaatttgacgacgataagtatgctgttgtcaatgaggatggctcattcaaagaaggttctgagagcgat

SEQ ID NO: 26 - protein, 90 aa, Saccharomyces cerevisiae
MKFSTALSVALFALAKMVIADSEEFGLVSIRSGSDLQYLSVYSDNGTLKLGSGSGSFEATITDDGKLKFDDDKYAVVNEDGSFKEGSESD

SEQ ID NO: 27 - DNA, 177 bp, Saccharomyces cerevisiae
atgaggtttttgaggggatttgtattttctttggctttcactctatataaagtaactgccacggcagaaataggatctgaaattaatgtggaaaatgaggcaccacctgatggtttatcctgggaggagtggcatatggaccatgagcatcagctaaaagattacactccagagact

SEQ ID NO: 28 - protein, 59 aa, Saccharomyces cerevisiae
MRFLRGFVFSLAFTLYKVTATAEIGSEINVENEAPPDGLSWEEWHMDHEHQLKDYTPET

SEQ ID NO: 29 - DNA, 300 bp, Saccharomyces cerevisiae
atgaggttttctatgttaatcgggtttaatttattaactgccttgagcagcttctgtgctgccatatcagctaataatagcgacaatgtcgaacatgaacaggaagttgcggaggcggtagcgccaccttctattaatatagaggtgaaatatgatgtcgttgggaaggaatcagaaaatcatgattctttccttgagttttacgcggaggataccgctaccttagcctataatgttactaattgggaagatactaatatcacaatttttggtgtcaacggaacaattgttacatatcca

SEQ ID NO: 30 - protein, 100 aa, Saccharomyces cerevisiae
MRFSMLIGFNLLTALSSFCAAISANNSDNVEHEQEVAEAVAPPSINIEVKYDVVGKESENHDSFLEFYAEDTATLAYNVTNWEDTNITIFGVNGTIVTYP

SEQ ID NO: 31 - DNA, 300 bp, Saccharomyces cerevisiae
atgaaagtgaggaaatatattactttatgcttttggtgggccttttcaacatccgctcttgtatcatcacaacaaattccattgaaggaccatacgtcacgacagtattttgctgtagaaagcaatgaaacattatcccgcttggaggaaatgcatccaaattggaaatatgaacatgatgttcgagggctaccaaaccattatgttttttcaaaagagttgctaaaattgggcaaaagatcatcattagaagagttacagggggataacaacgaccacatattatctgtccatgattta

SEQ ID NO: 32 - protein, 100 aa, Saccharomyces cerevisiae
MKVRKYITLCFWWAFSTSALVSSQQIPLKDHTSRQYFAVESNETLSRLEEMHPNWKYEHDVRGLPNHYVFSKELLKLGKRSSLEELQGDNNDHILSVHDL

SEQ ID NO: 33 - DNA, 201 bp, Saccharomyces cerevisiae
atgaaagtgcttgacctactaacggtactcagtgcctcttcattattatctacattcgcggctgccgaaagtactgctactgcagacagtacaactgcagcttctagcactgcttcgtgtaacccgttaaaaactacaggttgtacgccggatacagctttggcaactagttttagcgaagatttctcatcttcatccaaa

SEQ ID NO: 34 - protein, 67 aa, Saccharomyces cerevisiae
MKVLDLLTVLSASSLLSTFAAAESTATADSTTAASSTASCNPLKTTGCTPDTALATSFSEDFSSSSK

SEQ ID NO: 35 - DNA, 162 bp, Saccharomyces cerevisiae
atgtcactcctttacatcattcttctattcacacaattcttactactgccaaccgatgcctttgataggtctgctaacacaaatattgctgtttattggggtcaaaactcagcaggaacgcaagaatccttagctacttactgtgaatcttctgatgctgat

SEQ ID NO: 36 - protein, 54 aa, Saccharomyces cerevisiae
MSLLYIILLFTQFLLLPTDAFDRSANTNIAVYWGQNSAGTQESLATYCESSDAD

SEQ ID NO: 37 - DNA, 291 bp, Saccharomyces cerevisiae
atgcaattacggaacatattacaggctagctcgctaatttctggactttcgctcgctgcagattcgtcgtccactactggtgatggttatgctccatcaataattccttgtcccagtgatgatacctctttagttagaaacgcgtctggcttatctaccgctgaaactgattggttaaagaaaagagatgcgtacactaaagaagctttacattccttcttaagcagagctacttctaacttcagtgacacttctttgctatccactcttttcagtagtaactcttccaat

SEQ ID NO: 38 - protein, 97 aa, Saccharomyces cerevisiae
MQLRNILQASSLISGLSLAADSSSTTGDGYAPSIIPCPSDDTSLVRNASGLSTAETDWLKKRDAYTKEALHSFLSRATSNFSDTSLLSTLFSSNSSN

SEQ ID NO: 39 - DNA, 213 bp, Saccharomyces cerevisiae
atgcaattctctactgtcgcttccgttgctttcgtcgctttggctaactttgttgccgctgaatccgctgccgccatttctcaaatcactgacggtcaaatccaagctactaccactgctaccaccgaagctaccaccactgctgccccatcttccaccgttgaaactgtttctccatccagcaccgaaactatctctcaacaaactgaaaat

SEQ ID NO: 40 - protein, 71 aa, Saccharomyces cerevisiae
MQFSTVASVAFVALANFVAAESAAAISQITDGQIQATTTATTEATTTAAPSSTVETVSPSSTETISQQTEN

SEQ ID NO: 41 - DNA, 225 bp, Saccharomyces cerevisiae
atgatgaaggaatcgaaatctatcactcaacatgaggttgagagagaatctgtttcttccaagcgtgccattaaaaagagattacttctgtttaaaatagacttgtttgtgctatcatttgtttgcttgcaatactggattaattatgtcgaccgtgtcggtttcaccaatgcatatatatccggtatgaaggaagatcttaagatggtcggaaacgatttgacc

SEQ ID NO: 42 - protein, 75 aa, Saccharomyces cerevisiae
MMKESKSITQHEVERESVSSKRAIKKRLLLFKIDLFVLSFVCLQYWINYVDRVGFTNAYISGMKEDLKMVGNDLT

SEQ ID NO: 43 - DNA, 300 bp, Saccharomyces cerevisiae
atgtggtcgaaaaagtttacattaaaaaagctaatcttaggcgggtatttgtttgctcaaaaggtctattgtgaagacgaaagtaactctatatacggtacctggtcatctaaatcaaatcaagtgttcacgggaccggggttttatgatcccgtagatgaactattgatagaaccttcattgcccgggcttagctattcgttcactgaagatggttggtacgaagaagctacttaccaggtaagtggcaatcctcgtaacccaacttgccccatggcttcgttgatttatcagcatggt

SEQ ID NO: 44 - protein, 100 aa, Saccharomyces cerevisiae
MWSKKFTLKKLILGGYLFAQKVYCEDESNSIYGTWSSKSNQVFTGPGFYDPVDELLIEPSLPGLSYSFTEDGWYEEATYQVSGNPRNPTCPMASLIYQHG

SEQ ID NO: 45 - DNA, 150 bp, Saccharomyces cerevisiae
atgaagcttcaatttttttcctttattaccttatttgcttgtctcttcacaacagccatttttgcgaaagaggacacggcagaagatcctgagatcacacacaaggtctactttgacattaatcacggtgataaacaaattggtagaatt

SEQ ID NO: 46 - protein, 50 aa, Saccharomyces cerevisiae
MKLQFFSFITLFACLFTTAIFAKEDTAEDPEITHKVYFDINHGDKQIGRI

SEQ ID NO: 47 - DNA, 300 bp, Saccharomyces cerevisiae
atgcaattttctactgtcgcttctatcgccgctgtcgccgctgtcgcttctgccgctgctaacgttaccactgctactgtcagccaagaatctaccactttggtcaccatcacttcttgtgaagaccacgtctgttctgaaactgtctccccagctttggtttccaccgctaccgtcaccgtcgatgacgttatcactcaatacaccacctggtgcccattgaccactgaagccccaaagaacggtacttctactgctgctccagttacctctactgaagctccaaagaacaccacctct

SEQ ID NO: 48 - protein, 100 aa, Saccharomyces cerevisiae
MQFSTVASIAAVAAVASAAANVTTATVSQESTTLVTITSCEDHVCSETVSPALVSTATVTVDDVITQYTTWCPLTTEAPKNGTSTAAPVTSTEAPKNTTS

SEQ ID NO: 49 - DNA, 150 bp, Saccharomyces cerevisiae
atgcaagtgaccacaagatttatatctgcgatagtctcgttttgcctgtttgcttctttcacgttggctgaaaacagcgcaagagctacgccgggatcagatttactcgttctaacagagaagaaatttaaatcattcatcgaatctcat

SEQ ID NO: 50 - protein, 50 aa, Saccharomyces cerevisiae
MQVTTRFISAIVSFCLFASFTLAENSARATPGSDLLVLTEKKFKSFIESH

SEQ ID NO: 51 - DNA, 201 bp, Saccharomyces cerevisiae
atggcaatcgttaatagttggctaatttgtttagtcagtattttttccttcgtggtacgtgtagaggccgctacattttgcaatgcaactcaagcatgtcccgaagataaaccatgttgctcacaatatggtgaatgtggtactggtcaatattgtctgaacaactgtgatgtaagatattcgtttagtcatgattcatgt

SEQ ID NO: 52 - protein, 67 aa, Saccharomyces cerevisiae
MAIVNSWLICLVSIFSFVVRVEAATFCNATQACPEDKPCCSQYGECGTGQYCLNNCDVRYSFSHDSC

SEQ ID NO: 53 - DNA, 300 bp, Saccharomyces cerevisiae
atgttgtctttcacaaccaagaatagtttccgcttattacttttaatactgtcatgcatatcgacgatacgcgcacaatttttcgtgcaatcatcatcttcgaattcttcagcagtatctactgcacgttcttccgtaagtagagttagttcttcaagttccattttgtcatccagtatggtttcttcctcaagtgctgactcatcttcccttacttcatcgacatcaagtaggtccctcgtgtcacatacgagttcgtctaccagcattgcctccatatcgttcacatcattcagtttc

SEQ ID NO: 54 - protein, 100 aa, Saccharomyces cerevisiae
MLSFTTKNSFRLLLLILSCISTIRAQFFVQSSSSNSSAVSTARSSVSRVSSSSSILSSSMVSSSSADSSSLTSSTSSRSLVSHTSSSTSIASISFTSFSF

SEQ ID NO: 55 - DNA, 213 bp, Saccharomyces cerevisiae
atgcttgtgcggctgttgcgtgtgattttattggccagcatggttttctgtgctgatattttacaattaagctattcagatgatgcgaaagacgctatacccctaggaacatttgagattgatagtacatccgatgggaatgttacagtaacaaccgttaatatacaggatgttgaagtttctggagaatactgtttgaatgcccagattgaa

SEQ ID NO: 56 - protein, 71 aa, Saccharomyces cerevisiae
MLVRLLRVILLASMVFCADILQLSYSDDAKDAIPLGTFEIDSTSDGNVTVTTVNIQDVEVSGEYCLNAQIE

SEQ ID NO: 57 - DNA, 132 bp, Saccharomyces cerevisiae
atgtttcaacagctgtcggcatccattaggcacaatgcacacataatttttttatgcataagttggtattttatttcatcgttggcatctcaggtaacgaagcaggtactaacggtttgcccattaccactt

SEQ ID NO: 58 - protein, 44 aa, Saccharomyces cerevisiae
MFQQLSASIRHNAHIIFLCISWYFISSLASQVTKQVLTVCPLPL

SEQ ID NO: 59 - DNA, 186 bp, Saccharomyces cerevisiae
atgtcaacgcaactcgcaagtaacatatatgctccattgtacgctccctttttcgggttcgcaggttgtgcagctgccatggtgctttcctgtttgggagctgccattggtacagctaagtcaggtattggtatcgccggtataggtactttcaagccggaattgatcatgaagtctttgattcct

SEQ ID NO: 60 - protein, 62 aa, Saccharomyces cerevisiae
MSTQLASNIYAPLYAPFFGFAGCAAAMVLSCLGAAIGTAKSGIGIAGIGTFKPELIMKSLIP

SEQ ID NO: 61 - DNA, 180 bp, Saccharomyces cerevisiae
atgcaagctaaaattatatatgctctgagcgcaatttctgcgttgattccgttaggatcatcactattagcacctatagaagaccccatagtatcgaataagtacctcatatcttacatcgatgaggacgactggagtgataggatattacaaaatcagtctgtcatgaactcgggatat

SEQ ID NO: 62 - protein, 60 aa, Saccharomyces cerevisiae
MQAKIIYALSAISALIPLGSSLLAPIEDPIVSNKYLISYIDEDDWSDRILQNQSVMNSGY

SEQ ID NO: 63 - DNA, 159 bp, Saccharomyces cerevisiae
atgcaattacattcacttatcgcttcaactgcgctcttaataacgtcagctttggctgctacttcctcttcttccagcataccctcttcctgtaccataagctcacatgccacggccacagctcagagtgacttagataaatatagccgctgtgatacg

SEQ ID NO: 64 - protein, 53 aa, Saccharomyces cerevisiae
MQLHSLIASTALLITSALAATSSSSSIPSSCTISSHATATAQSDLDKYSRCDT

SEQ ID NO: 65 - DNA, 300 bp, Saccharomyces cerevisiae
atgaaatataatatagtgcatggaatttgcctattatttgctattacccaagctgtaggggctgtccatttttatgcgaagtccggggaaaccaaatgcttctatgaacacttatcccggggaaacctactgattggggatttagacctatatgtagaaaaggatggtctgtttgaagaggaccctgaatccagtctgacaataactgtcgatgaaacattcgataacgaccatcgtgtcctaaatcaaaaaaactcacacacaggtgatgttacttttacagctttagacacaggtgaa

SEQ ID NO: 66 - protein, 100 aa, Saccharomyces cerevisiae
MKYNIVHGICLLFAITQAVGAVHFYAKSGETKCFYEHLSRGNLLIGDLDLYVEKDGLFEEDPESSLTITVDETFDNDHRVLNQKNSHTGDVTFTALDTGE

SEQ ID NO: 67 - DNA, 300 bp, Saccharomyces cerevisiae
atgatacgtccattatgttcaaaaattattatcagttacatattcgcaatttctcagtttctactggccgctaatgcgtggtcgcccacagatagttatgttcctggcaccgtgtcgtgtcccgatgacataaatctggtaagagaggctacgtctatatctcagaatgagagcgcatggttggaaaagaggaataaagtcactagtgtagctttaaaagatttcttgactagggctactgcaaatttttcagatagctcagaagttttgtcgaagctatttaatgatggcaacagcgaa

SEQ ID NO: 68 - protein, 100 aa, Saccharomyces cerevisiae
MIRPLCSKIIISYIFAISQFLLAANAWSPTDSYVPGTVSCPDDINLVREATSISQNESAWLEKRNKVTSVALKDFLTRATANFSDSSEVLSKLFNDGNSE

SEQ ID NO: 69 - DNA, 150 bp, Saccharomyces cerevisiae
atgcaattctctaccgtcgcttctatcgctgctattgccgctgttgcctccgccgcttctaacattaccactgctactgtcacagaagaatctaccactttggtcactatcacttcttgtgaggaccacgtttgttctgaaacagtttcc

SEQ ID NO: 70 - protein, 50 aa, Saccharomyces cerevisiae
MQFSTVASIAAIAAVASAASNITTATVTEESTTLVTITSCEDHVCSETVS

SEQ ID NO: 71 - DNA, 123 bp, Saccharomyces cerevisiae
atggctttacatcaatttgactatatttttgccattgccatgttatttgcatttttggatgcctttaacatcggggcaaacgacgtggcgaactcattcgcgtcgtcgatctcttctagatct

SEQ ID NO: 72 - protein, 41 aa, Saccharomyces cerevisiae
MALHQFDYIFAIAMLFAFLDAFNIGANDVANSFASSISSRS

SEQ ID NO: 73 - DNA, 246 bp, Saccharomyces cerevisiae
atgaaattatctgtcctcacatttgtcgtagatgcattacttgtctgcagctcaatagtagatgccggtgttacagattttccatccttaccaagtaatgaagtctatgtcaaaatgaattttcagaagaaatacggcagttcatttgaaaacgctttggatgatacaaaaggtagaacgcgtttgatgacaagagatgatgattacgagctggtggaactgactaatcaaaacagtttttattcg

SEQ ID NO: 74 - protein, 82 aa, Saccharomyces cerevisiae
MKLSVLTFVVDALLVCSSIVDAGVTDFPSLPSNEVYVKMNFQKKYGSSFENALDDTKGRTRLMTRDDDYELVELTNQNSFYS

SEQ ID NO: 75 - DNA, 207 bp, Saccharomyces cerevisiae
atgaaattatcaactgtcctattatctgccggtttagcctcgactactttggcccaattttccaacagtacatctgcttcttccaccgatgtcacttcctcctcttccatctccacttcctctggctcagtaactatcacatcttctgaagctccagaatccgacaacggtaccagcacagctgcaccaactgaaacctcaacagag

SEQ ID NO: 76 - protein, 69 aa, Saccharomyces cerevisiae
MKLSTVLLSAGLASTTLAQFSNSTSASSTDVTSSSSISTSSGSVTITSSEAPESDNGTSTAAPTETSTE

SEQ ID NO: 77 - DNA, 102 bp, Saccharomyces cerevisiae
atggattctgccaagatcattaacattatattatcccttttcttaccaccagtcgccgtttttctagcccgtgggtggggtactgactgtatagtggatatc

SEQ ID NO: 78 - protein, 34 aa, Saccharomyces cerevisiae
MDSAKIINIILSLFLPPVAVFLARGWGTDCIVDI

SEQ ID NO: 79 - DNA, 189 bp, Saccharomyces cerevisiae
atgatagtgtggcaagcactattcgtggtttactgcctatttaccacttctattcacggtttattccaagacttcaatcctttcgcaaataagaatatttccttaaagtttcccagcctaaatagatgggagaaaaacgttatggctactggtcaacaaacaatcatcaattcggatagcatttatgaa

SEQ ID NO: 80 - protein, 63 aa, Saccharomyces cerevisiae
MIVWQALFVVYCLFTTSIHGLFQDFNPFANKNISLKFPSLNRWEKNVMATGQQTIINSDSIYE

SEQ ID NO: 81 - DNA, 300 bp, Saccharomyces cerevisiae
atgaaattttctgcgtatttatggtggctgtttttgaatctagcgttggtgaaaggcacttcattgctatccaacgttacattagcggaagattctttctgggagcattttcaggcttacactaatacaaagcatttaaaccaagagtggatcacaagtgaagccgtcaacaatgaaggctctaaaatatatggtgcacaatggcgactatcacagggtcgattgcaaggatccgcatgggataaaggaatcgcagttcgaacaggcaatgccgcagctatgataggacatctcttggag

SEQ ID NO: 82 - protein, 100 aa, Saccharomyces cerevisiae
MKFSAYLWWLFLNLALVKGTSLLSNVTLAEDSFWEHFQAYTNTKHLNQEWITSEAVNNEGSKIYGAQWRLSQGRLQGSAWDKGIAVRTGNAAAMIGHLLE

SEQ ID NO: 83 - DNA, 153 bp, Saccharomyces cerevisiae
atgctttcgcttaaaacgttactgtgtacgttgttgactgtgtcatcagtactcgctaccccagtccctgcaagagacccttcttccattcaatttgttcatgaggagaacaagaaaagatactacgattatgaccacggttccctcggagaa

SEQ ID NO: 84 - protein, 51 aa, Saccharomyces cerevisiae
MLSLKTLLCTLLTVSSVLATPVPARDPSSIQFVHEENKKRYYDYDHGSLGE

SEQ ID NO: 85 - DNA, 300 bp, Saccharomyces cerevisiae
atgacacagcttcagatttcattattgctgacagctactatatcactactccatctagtagtggccacgccctatgaggcatatcctatcggaaaacaataccccccagtggcaagagtcaatgaatcgtttacatttcaaatttccaatgatacctataaatcgtctgtagacaagacagctcaaataacatacaattgcttcgacttaccgagctggctttcgtttgactctagttctagaacgttctcaggtgaaccttcttctgacttactatctgatgcgaacaccacgttgtat

SEQ ID NO: 86 - protein, 100 aa, Saccharomyces cerevisiae
MTQLQISLLLTATISLLHLVVATPYEAYPIGKQYPPVARVNESFTFQISNDTYKSSVDKTAQITYNCFDLPSWLSFDSSSRTFSGEPSSDLLSDANTTLY

SEQ ID NO: 87 - DNA, 159 bp, Saccharomyces cerevisiae
atgaaaacggcctacttggcgtcattggtgctcatcgtatcgacagcatatgttattaggttgatagcgattctgccttttttccacactcaagcaggtacagaaaaggatacgaaagatggagttaacctactgaaaatacgaaaatcgtcaaagaaa

SEQ ID NO: 88 - protein, 53 aa, Saccharomyces cerevisiae
MKTAYLASLVLIVSTAYVIRLIAILPFFHTQAGTEKDTKDGVNLLKIRKSSKK

SEQ ID NO: 89 - DNA, 162 bp, Saccharomyces cerevisiae
atggctcaagccttgaactccaccaatattgcttttttcagagtagcatttttattcacgatcgccttcttttgtttaaagaacgttaattctattttgcaaaatacatatttcatagtcttaacgcaagcgatgaatttaccgcagttaacactgtcacgt

SEQ ID NO: 90 - protein, 54 aa, Saccharomyces cerevisiae
MAQALNSTNIAFFRVAFLFTIAFFCLKNVNSILQNTYFIVLTQAMNLPQLTLSR

SEQ ID NO: 91 - DNA, 159 bp, Saccharomyces cerevisiae
atggtttcgttcagagggctgactacactaacactactttttaccaaattagtaaactgtaatcctgtttccacaaaaaatagggactctatacagtttatttataaagaaaaggatagtatatactctgccatcaacaatcaagccatcaatgaaaaa

SEQ ID NO: 92 - protein, 53 aa, Saccharomyces cerevisiae
MVSFRGLTTLTLLFTKLVNCNPVSTKNRDSIQFIYKEKDSIYSAINNQAINEK

SEQ ID NO: 93 - DNA, 201 bp, Saccharomyces cerevisiae
atgatgtttaatatttaccttttcgtcacttttttttccaccattcttgcaggttccctgtcagatttggaaatcggtattatcaagagaataccggtagaagattgcttaattaaggcaatgccaggtgataaagttaaggttcattatacaggatctttattagaatcgggaactgtatttgactcaagttattcaaga

SEQ ID NO: 94 - protein, 67 aa, Saccharomyces cerevisiae
MMFNIYLFVTFFSTILAGSLSDLEIGIIKRIPVEDCLIKAMPGDKVKVHYTGSLLESGTVFDSSYSR

SEQ ID NO: 95 - DNA, 120 bp, Saccharomyces cerevisiae
atgaccagtttgtccaaaagcttcatgcagagtggacgaatctgcgcagcatgtttctatctgttattcacactactttcaattccaatctcgtttaaagttggtggtttggaatgcggg

SEQ ID NO: 96 - protein, 40 aa, Saccharomyces cerevisiae
MTSLSKSFMQSGRICAACFYLLFTLLSIPISFKVGGLECG

SEQ ID NO: 97 - DNA, 300 bp, Saccharomyces cerevisiae
atgagagtaagaccaaagaggtcggtcataacactcatggcgatagtagtcgtgatgctcatcctcagaaaccagttctactcatcacgaacgcgagggcatgggcaggaaccagtcatctcctccagccaaaagaatctttatgacgggtggataacacccaatttctatagaaagggtgatcccttggaattgattgtgaataaggtagaatctgacttaacgcaattgccatacgcatattatgacttgcccttcacttgtcctcctactatgcataaaaaaccgcttcatttatct

SEQ ID NO: 98 - protein, 100 aa, Saccharomyces cerevisiae
MRVRPKRSVITLMAIVVVMLILRNQFYSSRTRGHGQEPVISSSQKNLYDGWITPNFYRKGDPLELIVNKVESDLTQLPYAYYDLPFTCPPTMHKKPLHLS

SEQ ID NO: 99 - DNA, 300 bp, Saccharomyces cerevisiae
atgcctttgaagtcgttttttttttcagcatttctagttttatgcctgtctaaattcacgcaaggcgttggcaccacagagaaggaagaatcgttatcgcctttggaactaaatattttacaaaacaaattcgcctcctactatgcaaacgacactatcaccgtgaaaggtattactattggcggctggctagtaacagaaccttatatcacgccatcattatatcgtaatgctacgtcactggcaaaacagcaaaactcttccagcaatatctccattgtcgacgaatttactctttgt

SEQ ID NO: 100 - protein, 100 aa, Saccharomyces cerevisiae
MPLKSFFFSAFLVLCLSKFTQGVGTTEKEESLSPLELNILQNKFASYYANDTITVKGITIGGWLVTEPYITPSLYRNATSLAKQQNSSSNISIVDEFTLC

SEQ ID NO: 101 - DNA, 204 bp, Saccharomyces cerevisiae
atgtctataccccattccgtattttcggcactcttggtcttcgtggcgctagctactacaaccttagccagtacagaagcttgcttaccaacaaacaaaagggaagatggtatgaatattaatttttatgagtacacaataggcgaccaaaccacatacttggagcctgaatatatgggctatgaatactccaatacaaagaag

SEQ ID NO: 102 - protein, 68 aa, Saccharomyces cerevisiae
MSIPHSVFSALLVFVALATTTLASTEACLPTNKREDGMNINFYEYTIGDQTTYLEPEYMGYEYSNTKK

SEQ ID NO: 103 - DNA, 1662 bp, Cypridina noctiluca
  CDS (1)..(1662)
atgaagaccttaattcttgccgttgcattagtctactgcgccactgttcattgccaggactgtccttacgaacctgatccaccaaacacagttccaacttcctgtgaagctaaagaaggagaatgtattgatagcagctgcggcacctgcacgagagacatactatcagatggactgtgtgaaaataaaccaggaaaaacatgttgcagaatgtgtcagtatgtaattgaatgcagagtagaggctgcaggatggtttagaacattctatggaaagagattccagttccaggaacctggtacatacgtgttgggtcaaggaaccaagggcggcgactggaaggtgtccatcaccctggagaatctggatggaaccaaaggagctgtgctgaccaagacaagactggaagtggctggagacatcattgacatcgctcaagctactgagaatcccatcactgtgaacggtggagctgaccctatcatcgccaacccgtacaccatcggcgaggtcaccatcgctgttgttgagatgccaggcttcaacatcaccgtcattgaattcttcaaactgatcgtgatcgacatcctcggaggaagatctgtaagaatcgccccagacacagcaaacaaaggaatgatctctggcctctgtggagatcttaaaatgatggaagatacagacttcacttcagatccagaacaactcgctattcagcctaagatcaaccaggagtttgacggttgtccactctatggaaatcctgatgacgttgcatactgcaaaggtcttctcgagccatacaaggacagctgccgcaaccccatcaacttctactactacaccatctcctgcgccttcgctcgctgtatgggtggagacgagcgagcctcacacgtcctactggactacagggagacgtgcgctgctcccgaaactagaggaacctgcgttttgtctggacatactttctacgatacatttgacaaagcaagatatcaattccagggtccctgcaaggagattcttatggccgccgactgtttctggaacacttgggatgtgaaggtttcacacaggaatgttgactcttacactgaagtagagaaagtacgaatcaggaaacaatcgactgtagtagaactcattgttgatggaaaacagattctggttggaggagaagccgtgtccatcccgtacagctcccagaacacttccatctactggcaagatggcgacatactgactacagccatcctacctgaagctctggtcgtcaagttcaacttcaagcaactgctcgtagttcatattagagatccattcgatggtaagacttgcggtatttgcggtaactacaaccaggacttcagtgatgattcttttgatgctgaaggagcctgtgatctgacccccaacccaccgggatgcaccgaagaacagaaacctgaagccgaacgactctgcaatagtctttttgccggtcaaagtgatctcgatcagaaatgcaacgtgtgccacaagcctgaccgtgtcgaacgatgcatgtacgagtattgcctgaggggacaacaaggtttctgtgaccacgcatgggagttcaagaaagaatgctacataaagcatggtgacaccctagaagtaccagatgaatgcaaatag

SEQ ID NO: 104 - protein, 553 aa, Cypridina noctiluca
MKTLILAVALVYCATVHCQDCPYEPDPPNTVPTSCEAKEGECIDSSCGTCTRDILSDGLCENKPGKTCCRMCQYVIECRVEAAGWFRTFYGKRFQFQEPGTYVLGQGTKGGDWKVSITLENLDGTKGAVLTKTRLEVAGDIIDIAQATENPITVNGGADPIIANPYTIGEVTIAVVEMPGFNITVIEFFKLIVIDILGGRSVRIAPDTANKGMISGLCGDLKMMEDTDFTSDPEQLAIQPKINQEFDGCPLYGNPDDVAYCKGLLEPYKDSCRNPINFYYYTISCAFARCMGGDERASHVLLDYRETCAAPETRGTCVLSGHTFYDTFDKARYQFQGPCKEILMAADCFWNTWDVKVSHRNVDSYTEVEKVRIRKQSTVVELIVDGKQILVGGEAVSIPYSSQNTSIYWQDGDILTTAILPEALVVKFNFKQLLVVHIRDPFDGKTCGICGNYNQDFSDDSFDAEGACDLTPNPPGCTEEQKPEAERLCNSLFAGQSDLDQKCNVCHKPDRVERCMYEYCLRGQQGFCDHAWEFKKECYIKHGDTLEVPDECK

SEQ ID NO: 105 - DNA, 31 bp, Artificial Sequence
  Description of Artificial Sequence: primer
gcgcaagcttcaggactgtccttacgaacct

SEQ ID NO: 106 - DNA, 34 bp, Artificial Sequence
  Description of Artificial Sequence: primer
gcgctctagactatttgcattcatctggtacttc

SEQ ID NO: 107 - DNA, 610 bp, Saccharomyces cerevisiae
gatcccactaacggcccagccgaaaatggaaaaaaagggtcggtgatgtgtgggtgccagctggcggtagcaatgacgacgtgttgacgggcccttggctcttgggacaaggactagaagccaaaagccagaggcggtaaaaatagcaagactagaatattgctggcatctgttaaggggatatgttgcaacttgcagggggcggcacaaaataacatagaaacgtagtaaagaggggaaaaggaaaaggaaaaggaaaaggaaggaaaaaaacccattgacgtagaaattgaaagaaggaaaggtatacgcaagcattaatacaacccacaaacacagaccagaagcactctagacggagagtaactagatctacagcccctggaaaatcgtttggtcaactttgaggttccggtcgtccccctcttgatctgaaaggtctttctctaaatctatattaaaacgtataaataggacggtgaattgcgttctacttcctcaattgcgtttgatcttatttaatctctctctaatatatagaaaaaaaaaccatctgattattcgataatctcaaacaaacaactcaaaacaaaaaaaactaaatacaaca

SEQ ID NO: 108 - DNA, 27 bp, Artificial Sequence
  Description of Artificial Sequence: primer
ggactagtgatcccactaacggcccag

SEQ ID NO: 109 - DNA, 36 bp, Artificial Sequence
  Description of Artificial Sequence: primer
cgggatcctgttgtatttagttttttttgttttgag

SEQ ID NO: 110 - DNA, 225 bp, Saccharomyces cerevisiae
atgagtactagtgcggacactgataccatcaagaagccaatccttgcggtgccagagcctgcactggccgatacgcattcagaggagatatcacgctctggagaagaacatgaatcagagaacaacgagcactcagatgaagaaggcgataattattctgaaagagagcaatctgtgtcaaccgaaccactggatacattgccgttaagaaaaaagttgaaaaat

SEQ ID NO: 111 - protein, 75 aa, Saccharomyces cerevisiae
MSTSADTDTIKKPILAVPEPALADTHSEEISRSGEEHESENNEHSDEEGDNYSEREQSVSTEPLDTLPLRKKLKN

SEQ ID NO: 112 - DNA, 300 bp, Saccharomyces cerevisiae
atgccggtatctgattctggattcgataattcttcaaaaacaatgaaggacgacactataccgacggaggattacgaagaaatcacgaaagagtccgagatgggtgatgcgactaaaattacttctaagattgatgctaatgtcattgaaaaaaaagataccgattcagaaaacaatataaccattgctcaggatgacgaaaaggtgtcttggctgcaaagagttgtcgagttttttgaggttaagaatgactctaccgatttggccgatcataagcccgaaaatccaattaggacattt

SEQ ID NO: 113 - protein, 100 aa, Saccharomyces cerevisiae
MPVSDSGFDNSSKTMKDDTIPTEDYEEITKESEMGDATKITSKIDANVIEKKDTDSENNITIAQDDEKVSWLQRVVEFFEVKNDSTDLADHKPENPIRTF

SEQ ID NO: 114 - DNA, 222 bp, Saccharomyces cerevisiae
atgccagacaatctatcattacatttaagcggctcttcaaaaagattgaactctcgccaacttatggaatcttccaatgagacctttgcgccaaataatgtggatttggaaaaagagtataagtcatctcagagtaatataactaccgaagtttatgaggcatcgagctttgaagaaaaagtaagctcagaaaaacctcaatacagctcattctggaagaaa

SEQ ID NO: 115 - protein, 74 aa, Saccharomyces cerevisiae
MPDNLSLHLSGSSKRLNSRQLMESSNETFAPNNVDLEKEYKSSQSNITTEVYEASSFEEKVSSEKPQYSSFWKK

SEQ ID NO: 116 - DNA, 300 bp, Saccharomyces cerevisiae
atgaccggcttgaatggagatgatcctgatgactactatctgaaccttaatcaagatgaagagtctctacttaggtcaagacacagtgtcggctcaggagcacctcatagacaaggctctttagtgcggcccgaaagaagccgactgaacaatcctgataatccacatttttattatgcgcagaaaacgcaggagcagatgaatcacctggatgttttaccatcaagtaccggtgtaaacccaaatgcaactcgtcggagtggctccctgcgctccaaaggctcagtgagaagcaaattt

SEQ ID NO: 117 - protein, 100 aa, Saccharomyces cerevisiae
MTGLNGDDPDDYYLNLNQDEESLLRSRHSVGSGAPHRQGSLVRPERSRLNNPDNPHFYYAQKTQEQMNHLDVLPSSTGVNPNATRRSGSLRSKGSVRSKF

SEQ ID NO: 118 - DNA, 300 bp, Saccharomyces cerevisiae
atgacgagaaacccgtttatggtggaaccttcgaatggctctcctaatagacgtggtgcttcaaacctctccaaattttacgcaaacgctaacagcaactctcggtgggctaatcccagtgaggagagtttggaggatagctatgaccaatctaacgttttccaaggccttccggcatctccttcgagagctgcactaagatactccccagaccgtcgccatagaactcaattttaccgcgatagtgcccataactctccagttgctccgaacaggtatgctgctaatctacaagagtct

SEQ ID NO: 119 - protein, 100 aa, Saccharomyces cerevisiae
MTRNPFMVEPSNGSPNRRGASNLSKFYANANSNSRWANPSEESLEDSYDQSNVFQGLPASPSRAALRYSPDRRHRTQFYRDSAHNSPVAPNRYAANLQES

SEQ ID NO: 120 - DNA, 159 bp, Saccharomyces cerevisiae
atgtctcccatacaggttgttgtctttgccttgtcaaggattttcctgctattattcagacttatcaagctaattataacccctatccagaaatcactgggttatctatttggtaattattttgatgaattagaccgtaaatatagatacaaggaggat

SEQ ID NO: 121 - protein, 53 aa, Saccharomyces cerevisiae
MSPIQVVVFALSRIFLLLFRLIKLIITPIQKSLGYLFGNYFDELDRKYRYKED

SEQ ID NO: 122 - DNA, 291 bp, Saccharomyces cerevisiae
atgctatcttcagaagattttggatcttctgggaaaaaggaaacttctcctgattcgatatcgatacgttcctttagtgccgggaataatttccaatcatcatcaagtgagaaaacttattctaagcaaaaatccgggagtgacaaacttatacatagatttgcggattcattcaaaagagccgagggtagcactacaagaactaagcaaataaatgaaaatacgtctgatttagaggatggcgttgagtctatcacgtcggattccaagttgaaaaagtccatgaagtcg

SEQ ID NO: 123 - protein, 97 aa, Saccharomyces cerevisiae
MLSSEDFGSSGKKETSPDSISIRSFSAGNNFQSSSSEKTYSKQKSGSDKLIHRFADSFKRAEGSTTRTKQINENTSDLEDGVESITSDSKLKKSMKS

SEQ ID NO: 124 - DNA, 288 bp, Saccharomyces cerevisiae
atggacgatagtgtcagtttcattgccaaagaggccagtccagcacaatattcgcacagtttgcatgaaagaacacacagtgaaaaacaaaagagagactttacaataacagaaaaacaagatgaggtatctggacaaacagcggagcctcgaaggacggacagcaaatccatattacagaggaaatgcaaagaattcttcgactcttttaaaaggcagctgccaccagaccgtaattccgaactagagtcccaagaaaaaaacaacctgacaaagtcgatcaaatct

SEQ ID NO: 125 - protein, 96 aa, Saccharomyces cerevisiae
MDDSVSFIAKEASPAQYSHSLHERTHSEKQKRDFTITEKQDEVSGQTAEPRRTDSKSILQRKCKEFFDSFKRQLPPDRNSELESQEKNNLTKSIKS

SEQ ID NO: 126 - DNA, 300 bp, Saccharomyces cerevisiae
atgtcgcagacaattacatctctagatccgaattgtgttattgtattcaataaaacttcgagtgcaaacgagaagagtttgaatgtcgaattcaaacgtttgaatatacattctattatcgaacctggccatgatctgcaaacaagctatgcgtttattagaatccatcaggataatgcgaaaccgcttttttcatttttgcagaatctggacttcattgaatccatcataccatatcatgatactgaattgtccgatgatttgcataaactgatttctatcagcaaatcaaaaatactg

SEQ ID NO: 127 - protein, 100 aa, Saccharomyces cerevisiae
MSQTITSLDPNCVIVFNKTSSANEKSLNVEFKRLNIHSIIEPGHDLQTSYAFIRIHQDNAKPLFSFLQNLDFIESIIPYHDTELSDDLHKLISISKSKIL

SEQ ID NO: 128 - DNA, 300 bp, Saccharomyces cerevisiae
atgaatcaaagcgatccgcaagacaaaaaaaatttcccaatggaatactctttgaccaagcatcttttttttgataggcttctacttgttcttcccatagaatctaatttgaaaacatatgctgatgtggaggcagattcagttttcaattcgtgtcggtccatcattttgaatatagccatcactaaggacttgaacccgattatcgaaaacacattaggtttaattgacttgattgtgcaagatgaagaaattacgtctgacaatattacagatgatattgcccattctatattggtt

SEQ ID NO: 129 - protein, 100 aa, Saccharomyces cerevisiae
MNQSDPQDKKNFPMEYSLTKHLFFDRLLLVLPIESNLKTYADVEADSVFNSCRSIILNIAITKDLNPIIENTLGLIDLIVQDEEITSDNITDDIAHSILV

SEQ ID NO: 130 - DNA, 282 bp, Saccharomyces cerevisiae
atgtcacgtaagagctcgactgaatatgtgcataatcaggaggatgctgatatcgaagtatttgaatcagaataccgcacatatagggaatctgaggcggcagaaaacagagacggacttcacaatggtgatgaggaaaattggaaggttaatagtagtaagcagaaatttggggtaacgaaaaatgagctatcagatgtcctgtacgattccattccagcgtatgaagagagcacagtcactttgaaggagtactatgatcattctatcaaaaacaatcta

SEQ ID NO: 131 - protein, 94 aa, Saccharomyces cerevisiae
MSRKSSTEYVHNQEDADIEVFESEYRTYRESEAAENRDGLHNGDEENWKVNSSKQKFGVTKNELSDVLYDSIPAYEESTVTLKEYYDHSIKNNL

SEQ ID NO: 132 - DNA, 267 bp, Saccharomyces cerevisiae
atgaagggattatcctcattaataaacagaaaaaaagacaggaacgactcacacttagatgagatcgagaatggcgtgaacgctaccgaattcaactcgatagagatggaggagcaaggtaagaaaagtgattttgatctttcccatcttgagtacggtccaggttcactaataccaaacgataataatgaagaagtccccgaccttctcgatgaagctatgcaggacgccaaagaggcagatgaaagtgagaggggaatgccactc

SEQ ID NO: 133 - protein, 89 aa, Saccharomyces cerevisiae
MKGLSSLINRKKDRNDSHLDEIENGVNATEFNSIEMEEQGKKSDFDLSHLEYGPGSLIPNDNNEEVPDLLDEAMQDAKEADESERGMPL

SEQ ID NO: 134 - DNA, 291 bp, Saccharomyces cerevisiae
atgtcgtcgtcgaagtctctatacgaactgaaagacttgaaaaatagctccacagaaatacatgccacggggcaggataatgaaattgaatatttcgaaacaggctccaatgaccgtccatcctcacaacctcatttaggttacgaacagcataacacttctgccgtgcgtaggtttttcgactcctttaaaagagcggatcagggtccacaggatgaagtagaagcaacacaaatgaacgatcttacgtcggctatctcaccttcttctagacaggctcaagaactagaa

SEQ ID NO: 135 - protein, 97 aa, Saccharomyces cerevisiae
MSSSKSLYELKDLKNSSTEIHATGQDNEIEYFETGSNDRPSSQPHLGYEQHNTSAVRRFFDSFKRADQGPQDEVEATQMNDLTSAISPSSRQAQELE

SEQ ID NO: 136 - DNA, 210 bp, Saccharomyces cerevisiae
atggtagcaacaataatgcagacgacaacaactgtgctgacgacagtcgccgcaatgtctactaccttagcatcaaattacatatcttcgcaagctagttcctcgacgagtgtaacaacagtaacgacaatagcgacatcaatacgctctacaccgtctaatctactcttttctaatgtggcggctcagccaaaatcatcttcagcaagc

SEQ ID NO: 137 - protein, 70 aa, Saccharomyces cerevisiae
MVATIMQTTTTVLTTVAAMSTTLASNYISSQASSSTSVTTVTTIATSIRSTPSNLLFSNVAAQPKSSSAS

SEQ ID NO: 138 - DNA, 300 bp, Saccharomyces cerevisiae
atgggaagtcatcgacgttatctctactatagtatattatcatttctattattatcctgctcagtggtacttgcaaaacaagataagaccccattctttgaaggtacttcttcgaaaaattcgcgtctaactgcacaagataagggcaatgatacatgcccgccatgttttaattgtatgctacctatttttgaatgcaaacagttttctgaatgcaattcgtacactggtagatgtgagtgtatagaagggtttgcaggtgatgattgctctctgcccctctgtggcggtctatcaccg

SEQ ID NO: 139 - protein, 100 aa, Saccharomyces cerevisiae
MGSHRRYLYYSILSFLLLSCSVVLAKQDKTPFFEGTSSKNSRLTAQDKGNDTCPPCFNCMLPIFECKQFSECNSYTGRCECIEGFAGDDCSLPLCGGLSP

SEQ ID NO: 140 - DNA, 102 bp, Saccharomyces cerevisiae
atgaacgatacgctatcaagctttttaaatcgtaacgaggctttagggcttaatccaccacatggcctggatatgcacattaccaagagaggttcggattgg

SEQ ID NO: 141 - protein, 34 aa, Saccharomyces cerevisiae
MNDTLSSFLNRNEALGLNPPHGLDMHITKRGSDW

SEQ ID NO: 142 - DNA, 102 bp, Saccharomyces cerevisiae
atgactttaccaggtggtgttattttagttttcattttggtcggtttggcttgtattgccattattgctaccattatctacagaaaatggcaagctagacaa

SEQ ID NO: 143 - protein, 34 aa, Saccharomyces cerevisiae
MTLPGGVILVFILVGLACIAIIATIIYRKWQARQ

SEQ ID NO: 144 - DNA, 186 bp, Saccharomyces cerevisiae
atgaattcactcgttactcaatatgctgctccgttgttcgagcgttatccccaacttcatgactatttaccaactttggagcgaccattttttaatatttcgttgtgggaacatttcgatgatgtcgtcactcgtgtaactaacggtagatttgttccaagcgaattccaattcattgcaggtgaa

SEQ ID NO: 145 - protein, 62 aa, Saccharomyces cerevisiae
MNSLVTQYAAPLFERYPQLHDYLPTLERPFFNISLWEHFDDVVTRVTNGRFVPSEFQFIAGE

SEQ ID NO: 146 - DNA, 255 bp, Saccharomyces cerevisiae
atggaagacaaagatatcacatcggtaaatgagaaggaagtgaacgagaacactaatcctagaataataaaatatgatgccgagaggcgtgcaacccgtactgaaacctcaaagaaagataaatggaaaaacatagttacaatcattgcgtccggttttgctctgataagtgatggttacgtaaatggttcaatgagtatgctaaacaaggtttttgttatggagtacggtaagaaaaactatagctcaaaagtg

SEQ ID NO: 147 - protein, 85 aa, Saccharomyces cerevisiae
MEDKDITSVNEKEVNENTNPRIIKYDAERRATRTETSKKDKWKNIVTIIASGFALISDGYVNGSMSMLNKVFVMEYGKKNYSSKV

SEQ ID NO: 148 - DNA, 165 bp, Saccharomyces cerevisiae
atgataactgagggatttcccccgaatttaaacgcgttgaaagggtcatccttactagaaaagagagttgattctctccgacagcttaacactaccacggttaaccagctgctggggttgccggggatgacctctacattcacggctccgcaactgttgcagtta

SEQ ID NO: 149 - protein, 55 aa, Saccharomyces cerevisiae
MITEGFPPNLNALKGSSLLEKRVDSLRQLNTTTVNQLLGLPGMTSTFTAPQLLQL

SEQ ID NO: 150 - DNA, 261 bp, Saccharomyces cerevisiae
atgaacgatagccaaaactgcctacgacagagggaagaaaatagtcatctgaatcctggaaatgacttcggccaccaccagggtgcagaatgtacgataaatcataacaacatgccacaccgcaatgcatacacagaatctacgaatgacacggaagcaaagtccatagtgatgtgcgacgatcctaacgcataccaaatttcctacacaaataatgagccggcgggagatggagctatagaaaccacgtccattctacta

SEQ ID NO: 151 - protein, 87 aa, Saccharomyces cerevisiae
MNDSQNCLRQREENSHLNPGNDFGHHQGAECTINHNNMPHRNAYTESTNDTEAKSIVMCDDPNAYQISYTNNEPAGDGAIETTSILL

SEQ ID NO: 152 - DNA, 279 bp, Saccharomyces cerevisiae
atggatcctaatagtaacagttctagcgaaacattacgccaagagaaacagggtttcctagacaaagctcttcagagggtgaagggcatagcactgcgacgaaacaatagtaacaaagatcatacaacagatgatacgacaggtagcatacgaacccctacgagcttgcagcggcaaaattctgacaggcaatctaatatgacatccgtgtttacggatgacatttctaccatagacgacaactcaattttattttcagagcctcctcagaaacaatct

SEQ ID NO: 153 - protein, 93 aa, Saccharomyces cerevisiae
MDPNSNSSSETLRQEKQGFLDKALQRVKGIALRRNNSNKDHTTDDTTGSIRTPTSLQRQNSDRQSNMTSVFTDDISTIDDNSILFSEPPQKQS

SEQ ID NO: 154 - DNA, 225 bp, Saccharomyces cerevisiae
atgagtatgtcaagcaaaaacgagaataagatatcagtagaacaaagaatatccactgatatcggtcaggcttaccagttacaaggccttgggtctaacctaaggtcgattcgctccaagactggtgccggtgaagtgaactatatcgatgctgctaaatctgtaaatgataaccaactgcttgcagagatcggttataaacaagaattaaaaagacaattttca

SEQ ID NO: 155 - protein, 75 aa, Saccharomyces cerevisiae
MSMSSKNENKISVEQRISTDIGQAYQLQGLGSNLRSIRSKTGAGEVNYIDAAKSVNDNQLLAEIGYKQELKRQFS

SEQ ID NO: 156 - DNA, 156 bp, Saccharomyces cerevisiae
atggcaagcgaacagtcctcaccagaaattaatgcagataatctaaacagtagtgcagctgacgttcatgtacagccacccggagagaaagaatggtcagacgggttttatgacaaagaagtcattaatggaaatacgccagacgcaccgaagaga

SEQ ID NO: 157 - protein, 52 aa, Saccharomyces cerevisiae
MASEQSSPEINADNLNSSAADVHVQPPGEKEWSDGFYDKEVINGNTPDAPKR

SEQ ID NO: 158 - DNA, 255 bp, Saccharomyces cerevisiae
atgaaaaacttatcttttctcataaacagaagaaaggaaaatacaagtgactcgaatgtatacccaggaaaggctaagtcgcatgaacccagctggatagaaatggatgatcaaactaagaaggacggcttagatattgttcatgttgagttcagtccggatacaagagcgccaagcgatagcaataaagtaataacagagatatttgacgctactgaggatgccaaggaggcagacgaaagtgaaagaggaatg

SEQ ID NO: 159 - protein, 85 aa, Saccharomyces cerevisiae
MKNLSFLINRRKENTSDSNVYPGKAKSHEPSWIEMDDQTKKDGLDIVHVEFSPDTRAPSDSNKVITEIFDATEDAKEADESERGM

SEQ ID NO: 160 - DNA, 300 bp, Saccharomyces cerevisiae
atgagcaatatcaaaagcacgcaagatagctctcataatgctgtcgctagaagctcaagcgcttcttttgcagcttcagaagaatcatttacgggcataacccatgacaaagatgagcagagcgataccccggcggataaactaacaaaaatgctgacaggacctgcaagagacactgcgagccagattagtgccactgtgtctgaaatggcgccagatgtcgtatctaaagtggagtcatttgcagatgcactatcccgtcatacaacgagaagcggtgcctttaatatggattcagat

SEQ ID NO: 161 - protein, 100 aa, Saccharomyces cerevisiae
MSNIKSTQDSSHNAVARSSSASFAASEESFTGITHDKDEQSDTPADKLTKMLTGPARDTASQISATVSEMAPDVVSKVESFADALSRHTTRSGAFNMDSD

SEQ ID NO: 162 - DNA, 102 bp, Saccharomyces cerevisiae
atgtctacctttgaaactttaattaaaagaggtggtaacgaagccatcaaaattaaccctccaaccggtgcggatttccacatcactagtcgtggttccgat

SEQ ID NO: 163 - protein, 34 aa, Saccharomyces cerevisiae
MSTFETLIKRGGNEAIKINPPTGADFHITSRGSD

SEQ ID NO: 164 - DNA, 279 bp, Saccharomyces cerevisiae
atgtcagatcctatagtaacgtcttccaaaatggaaaaaagtgcagagtttgaagtaacagactctgctttatataataacttcaatacatcaacaacagcttcactaactccggagattaaggaacattctgaggaatctcgcaatgggttagttcacagattcgtcgactcattcagaagagccgaaagccaacgtttagaagaagacaatgacttggaggatggtaccaaatcgatgaaatctaataaccacttaaaaaagtcaatgaaatctaga

SEQ ID NO: 165 - protein, 93 aa, Saccharomyces cerevisiae
MSDPIVTSSKMEKSAEFEVTDSALYNNFNTSTTASLTPEIKEHSEESRNGLVHRFVDSFRRAESQRLEEDNDLEDGTKSMKSNNHLKKSMKSR

SEQ ID NO: 166 - DNA, 300 bp, Saccharomyces cerevisiae
atgtcaagtccctccaaacccacttctcccttcgtggatgatattgagcatgaatcgggatcagcatctaatggtctgtcgtccatgtcaccatttgacgatagttttcaatttgaaaaacccagtagtgcgcatggaaatattgaagtagcgaaaaccggcggttctgttttgaagcgacaatctaagccaatgaaagatattagcacacccgatctctcaaaagttacttttgatggaatcgatgattatagtaacgataatgatattaatgatgatgatgaactcaatggtaaaaaa

SEQ ID NO: 167 - protein, 100 aa, Saccharomyces cerevisiae
MSSPSKPTSPFVDDIEHESGSASNGLSSMSPFDDSFQFEKPSSAHGNIEVAKTGGSVLKRQSKPMKDISTPDLSKVTFDGIDDYSNDNDINDDDELNGKK

SEQ ID NO: 168 - DNA, 171 bp, Saccharomyces cerevisiae
atgtcacaagacgctgctattgcagagcaaactcctgtggagcatctctctgctgttgactcagcctcccactcggttttatctacaccatcaaacaaggctgaaagagatgaaataaaagcttatggtgaaggtgaagagcacgaacctgtcgttgaaattccaaagaga

SEQ ID NO: 169 - protein, 57 aa, Saccharomyces cerevisiae
MSQDAAIAEQTPVEHLSAVDSASHSVLSTPSNKAERDEIKAYGEGEEHEPVVEIPKR

SEQ ID NO: 170 - DNA, 171 bp, Saccharomyces cerevisiae; identical to SEQ ID NO: 168

SEQ ID NO: 171 - protein, 57 aa, Saccharomyces cerevisiae; identical to SEQ ID NO: 169

SEQ ID NO: 172 - DNA, 168 bp, Saccharomyces cerevisiae
atgaattcaactccagatttaatatctccacaaaagtcaagtgagaattcgaatgctgacctgccttcgaatagctctcaggtaatgaacatgcctgaagaaaaaggtgttcaagatgatttccaagctgaggccgaccaagtacttaccaacccaaatacaggtaaa

SEQ ID NO: 173 - protein, 56 aa, Saccharomyces cerevisiae
MNSTPDLISPQKSSENSNADLPSNSSQVMNMPEEKGVQDDFQAEADQVLTNPNTGK

SEQ ID NO: 174 - DNA, 252 bp, Saccharomyces cerevisiae
atgacatcgtctgcttcttctccacaggatttggaaaagggtgtgaacactctagaaaatattgagacgctcccccagcagggttcgattgcaggcgtttcgcagggcttccctaatattcaagagatatactccgacagagacttcattactctaggatcctccacctacaggcgcagagatttgctcaatgcactagacagaggggatggggaggaaggaaactgtgcaaagtatactccgcaccagttc

SEQ ID NO: 175 - protein, 84 aa, Saccharomyces cerevisiae
MTSSASSPQDLEKGVNTLENIETLPQQGSIAGVSQGFPNIQEIYSDRDFITLGSSTYRRRDLLNALDRGDGEEGNCAKYTPHQF

SEQ ID NO: 176 - DNA, 237 bp, Saccharomyces cerevisiae
atgggaatacacataccatatctcacgtcaaagacatcgcaatcaaatgttggtgatgccgttggcaacgctgatagtgtagagttcaacagtgagcatgactcaccttcaaagagaggtaaaattacacttgagtcacatgaaatacagagggctcccgctagcgatgatgaagataggattcaaattaaacccgtgaacgacgaggatgacacgtcggtcatgatcacttttaac

SEQ ID NO: 177 - protein, 79 aa, Saccharomyces cerevisiae
MGIHIPYLTSKTSQSNVGDAVGNADSVEFNSEHDSPSKRGKITLESHEIQRAPASDDEDRIQIKPVNDEDDTSVMITFN

SEQ ID NO: 178 - DNA, 219 bp, Saccharomyces cerevisiae
atgaaggatttaaaattatcgaatttcaaaggcaaatttataagcagaaccagtcactggggacttacgggtaagaagttgcggtatttcatcactatcgcatctatgacgggcttctccctgtttggatacgaccaagggttgatggcaagtctaattactggtaaacagttcaactatgaatttccagcaaccaaagaaaatggcgatcatgacaga

SEQ ID NO: 179 - protein, 73 aa, Saccharomyces cerevisiae
MKDLKLSNFKGKFISRTSHWGLTGKKLRYFITIASMTGFSLFGYDQGLMASLITGKQFNYEFPATKENGDHDR

SEQ ID NO: 180 - DNA, 102 bp, Saccharomyces cerevisiae
atgttgatgagcacgttaccaggtggtgttatcttagtttttattctagtcggtttggcttgtatcgccatcatttctaccattatctacagaaaatggcaa

SEQ ID NO: 181 - protein, 34 aa, Saccharomyces cerevisiae
MLMSTLPGGVILVFILVGLACIAIISTIIYRKWQ

SEQ ID NO: 182 - DNA, 273 bp, Saccharomyces cerevisiae
atgacaaattcaaaagaagacgccgacatagaggagaagcatatgtacaatgagccggtcacaaccctctttcacgacgttgaagcttcacaaacacaccacagacgtgggtcaataccattgaaagatgagaaaagtaaagaattgtatccattgcgctctttcccgacgagagtaaatggcgaggatacgttctctatggaggatggcataggtgatgaagatgaaggagaagtacagaacgctgaagtgaagagagagcttaagcaaaga

SEQ ID NO: 183 - protein, 91 aa, Saccharomyces cerevisiae
MTNSKEDADIEEKHMYNEPVTTLFHDVEASQTHHRRGSIPLKDEKSKELYPLRSFPTRVNGEDTFSMEDGIGDEDEGEVQNAEVKRELKQR

SEQ ID NO: 184 - DNA, 195 bp, Saccharomyces cerevisiae
atggaccctggtattgctaatcataccctccccgaggaatttgaagaggttgtcgttcccgagatgctggaaaaggaagtaggagccaaggtcgatgtcaagccaacgctaaccacatcttctccagcaccttcttacattgaattgatagatccaggtgtgcataacatcgagatttacgcagaaatgtacaac

SEQ ID NO: 185 - protein, 65 aa, Saccharomyces cerevisiae
MDPGIANHTLPEEFEEVVVPEMLEKEVGAKVDVKPTLTTSSPAPSYIELIDPGVHNIEIYAEMYN

SEQ ID NO: 186 - DNA, 147 bp, Saccharomyces cerevisiae
atgtctagtgcgcaatcctctattgatagcgatggagatgttcgagatgctgatattcatgtcgcaccacccgtggaaaaagagtggtcagatggatttgatgacaacgaagtcataaacggggataacgttgagccaccaaaaaga

SEQ ID NO: 187 - protein, 49 aa, Saccharomyces cerevisiae
MSSAQSSIDSDGDVRDADIHVAPPVEKEWSDGFDDNEVINGDNVEPPKR

SEQ ID NO: 188 - DNA, 300 bp, Saccharomyces cerevisiae
atgaggtcctcgaagtctccttttaaaaggaagtctcacagtcgtgagacatcacacgatgaaaacacatcgtttttccacaagagaacaatatccggtagcagtgctcaccattctagaaacgtcagtcaaggtgcagtaccctcttccgcaccacctgtttctggtggaaattattcgcataagagaaacgtgtcgagagcttcaaattcctctcaaacttcgaattttttagccgaacaatatgaaagggataggaaagccataattaattgctgcttttccagacccgaccataag

SEQ ID NO: 189 - protein, 100 aa, Saccharomyces cerevisiae
MRSSKSPFKRKSHSRETSHDENTSFFHKRTISGSSAHHSRNVSQGAVPSSAPPVSGGNYSHKRNVSRASNSSQTSNFLAEQYERDRKAIINCCFSRPDHK

SEQ ID NO: 190 - DNA, 267 bp, Saccharomyces cerevisiae
atgttggaagagggaaataatgtttacgaaatccaagacttggagaagagatctcctgtaataggctcaagcttggaaaacgaaaagaaggtagccgcttctgaaactttcacagcaacttccgaagatgaccaacagtatatcgttgaatcatcagaggccacaaaattatcgtggttccataagttctttgccagtttgaatgcagaaacaaagggtgttgaaccagttacagaggatgaaaaaacggacgattccatactgaat

SEQ ID NO: 191 - protein, 89 aa, Saccharomyces cerevisiae
MLEEGNNVYEIQDLEKRSPVIGSSLENEKKVAASETFTATSEDDQQYIVESSEATKLSWFHKFFASLNAETKGVEPVTEDEKTDDSILN

SEQ ID NO: 192 - DNA, 102 bp, Saccharomyces cerevisiae
atgtcttcagcaccattattacaaagaacacctgggaaaaagatcgctttgcccacacgagttgagccaaaagtgttctttgccaatgagcgtacctttttg

SEQ ID NO: 193 - protein, 34 aa, Saccharomyces cerevisiae
MSSAPLLQRTPGKKIALPTRVEPKVFFANERTFL

SEQ ID NO: 194 - DNA, 195 bp, Saccharomyces cerevisiae
atgtcaatatcatcaaagataagaccaactcctcgtaaaccttcacgtatggctaccgaccattcttttaaaatgaaaaaattttatgccgatcctttcgctatatcatcaatttctttggcaattgtatcgtgggtcatcgccatcgggggctccatctcatctgcatccaccaatgaatccttcccacgtttt

SEQ ID NO: 195 - protein, 65 aa, Saccharomyces cerevisiae
MSISSKIRPTPRKPSRMATDHSFKMKKFYADPFAISSISLAIVSWVIAIGGSISSASTNESFPRF

SEQ ID NO: 196 - DNA, 150 bp, Saccharomyces cerevisiae
atgcctaacaaagtgtttaacgtggccgttttcttcgttgtgttcagagagtgcttggaagcagtgattgttatttccgtgctgctatcgtttttgaaacaggcaatcggggaacatgaccgggcgctgtaccgtaaattaaggattcag

SEQ ID NO: 197 - protein, 50 aa, Saccharomyces cerevisiae
MPNKVFNVAVFFVVFRECLEAVIVISVLLSFLKQAIGEHDRALYRKLRIQ

SEQ ID NO: 198 - DNA, 300 bp, Saccharomyces cerevisiae
atgtctggaacttttcatggcgatgggcatgctcccatgtcgccctttgaagatacatttcaatttgaagataatagcagtaatgaagatacacatattgcacctacccattttgatgatggtgcaacaagcaacaaatacagccggccacaggtcagcttcaatgatgaaacacccaaaaataaacgtgaagatgcagaagaattcacatttaacgatgacacagaatatgacaatcattcctttcagccaacaccgaaacttaataatggatctgggacgtttgatgatgtggaatta

SEQ ID NO: 199 - protein, 100 aa, Saccharomyces cerevisiae
MSGTFHGDGHAPMSPFEDTFQFEDNSSNEDTHIAPTHFDDGATSNKYSRPQVSFNDETPKNKREDAEEFTFNDDTEYDNHSFQPTPKLNNGSGTFDDVEL

SEQ ID NO: 200 - DNA, 126 bp, Saccharomyces cerevisiae
atggttagttcaagtgtttccattttggggactagcgccaaggcatccacttctctaagtagaaaggatgaaattaaactaacccctgaaacaagggaagctagcttggacattccatacaaaccc

SEQ ID NO: 201 - protein, 42 aa, Saccharomyces cerevisiae
MVSSSVSILGTSAKASTSLSRKDEIKLTPETREASLDIPYKP

SEQ ID NO: 202 - DNA, 129 bp, Saccharomyces cerevisiae
atgtctgatgcggctccttcattgagcaatctattttatgatccaacgtataatcctggtcaaagcaccattaactacacttccatatatgggaatggatctaccatcactttcgatgagttgcaaggt

SEQ ID NO: 203 - protein, 43 aa, Saccharomyces cerevisiae
MSDAAPSLSNLFYDPTYNPGQSTINYTSIYGNGSTITFDELQG

SEQ ID NO: 204 - DNA, 300 bp, Saccharomyces cerevisiae
atgttgttctactcgttcgtgtggtctgtactggccgctagtgttgctttggcaaagacacataagttaaactataccgcttcttgggtaactgccaatcctgatggattgcatgaaaaaaggatgattggttttaatggcgaatggccacttccagatatccatgttgaaaaaggagatcgtgttgagctttatttgactaacggctttcaagacaatactgctacttctctacatttccatggtcttttccagaatacgagtttggggaaccagcttcaaatggatggtccttctatg

SEQ ID NO: 205 - protein, 100 aa, Saccharomyces cerevisiae
MLFYSFVWSVLAASVALAKTHKLNYTASWVTANPDGLHEKRMIGFNGEWPLPDIHVEKGDRVELYLTNGFQDNTATSLHFHGLFQNTSLGNQLQMDGPSM

SEQ ID NO: 206 - DNA, 300 bp, Saccharomyces cerevisiae
atgtcgtccttatccacttcatttgattcatcgtcagatttaccaaggtcaaaatccgttgacaatacggcggcttccatgaagacaggcaagtacccaaaattagagaactataggcagtattctgatgcacaaccaatacgtcacgaagcgcttgcattgaaagtggacgaaacgaaagattctagacacaaatttagttcctctaacggggagaatagtggagtggaaaatggaggctatgtggagaaaacgaatatatccacaagtggccgcatggattttgaaggtgaagcagaa

SEQ ID NO: 207 - protein, 100 aa, Saccharomyces cerevisiae
MSSLSTSFDSSSDLPRSKSVDNTAASMKTGKYPKLENYRQYSDAQPIRHEALALKVDETKDSRHKFSSSNGENSGVENGGYVEKTNISTSGRMDFEGEAE

SEQ ID NO: 208 - DNA, 300 bp, Saccharomyces cerevisiae
atgactgatacatcatcctcttcatcatcctcttcagcatcttctgtttcagctcatcagccaactcaagaaaagcctgctaagacttacgatgacgctgcatctgaatcttctgacgatgacgatatcgatgctttaatcgaagaactacaatctaatcacggtgtcgacgacgaagacagtgataacgatggtccagttgccgccggtgaagctagaccagttccagaagaatatttacaaactgacccatcttacggtttaacttccgatgaagttttgaaaagaagaaagaagtac

SEQ ID NO: 209 - protein, 100 aa, Saccharomyces cerevisiae
MTDTSSSSSSSSASSVSAHQPTQEKPAKTYDDAASESSDDDDIDALIEELQSNHGVDDEDSDNDGPVAAGEARPVPEEYLQTDPSYGLTSDEVLKRRKKY

SEQ ID NO: 210 - DNA, 171 bp, Saccharomyces cerevisiae
atgagtattcggaatgataatgcttccggtggctatatgcagccggatcaatcttcgaacgcttctatgcacaaaagagacttaagagttgaggaggaaataaagccattggatgatatggatagcaagggtgctgtagcagcagatggtgaagttcatctaagaaagtca

SEQ ID NO: 211 - protein, 57 aa, Saccharomyces cerevisiae
MSIRNDNASGGYMQPDQSSNASMHKRDLRVEEEIKPLDDMDSKGAVAADGEVHLRKS

SEQ ID NO: 212 - DNA, 300 bp, Saccharomyces cerevisiae
atgtcctacaacgatccaaacttgaatggacagtattacagtaacggtgatgggactggtgacggtaattaccctacgtaccaagtgacacaggatcaaagtgcgtacgatgagtacggtcagccaatctatacacaaaaccaactggatgatggttattatgatccaaacgaacaatacgttgacggtacacaatttcctcagggacaagatccttcacaagaccaaggtccttataataacgatgctagttactataaccaaccccccaatatgatgaacccgtcttctcaagatgga

SEQ ID NO: 213 - protein, 100 aa, Saccharomyces cerevisiae
MSYNDPNLNGQYYSNGDGTGDGNYPTYQVTQDQSAYDEYGQPIYTQNQLDDGYYDPNEQYVDGTQFPQGQDPSQDQGPYNNDASYYNQPPNMMNPSSQDG

SEQ ID NO: 214 - DNA, 180 bp, Saccharomyces cerevisiae
atgtcggaaggaagaacgtttctgtcacagttgaatgtcttcaacaaggagaactatcaattttcttcttctactacaaaaaaggaagtaagtaactcgacagtggatgctgacaacggtgcctccgattttgaggcaggccagcaatttgctacagaattggaccaaggtgaaaagcag

SEQ ID NO: 215 - protein, 60 aa, Saccharomyces cerevisiae
MSEGRTFLSQLNVFNKENYQFSSSTTKKEVSNSTVDADNGASDFEAGQQFATELDQGEKQ

SEQ ID NO: 216 - DNA, 147 bp, Saccharomyces cerevisiae
atggagagtcgaactacagggcctttaacgactgaaacctacgatggccccactgtggccttcatgatattaggtgccgccctagtattttttatggtgcccggattgggattcttgtactccggattggcaagaaggaagtctgca

SEQ ID NO: 217 - protein, 49 aa, Saccharomyces cerevisiae
MESRTTGPLTTETYDGPTVAFMILGAALVFFMVPGLGFLYSGLARRKSA

SEQ ID NO: 218 - DNA, 273 bp, Saccharomyces cerevisiae
atgcctagaaacccattgaaaaaggaatattgggcagatgtagttgacggattcaagccggctacttctccagccttcgagaatgaaaaagaatctactacatttgttaccgaactaacttccaaaaccgattctgcatttccattaagtagcaaggattcacctggcataaaccaaaccacaaacgatattacctcttcagatcgcttccgtcgtaatgaagacacagagcaggaagacatcaacaacaccaacctgagtaaagatctatcc

SEQ ID NO: 219 - protein, 91 aa, Saccharomyces cerevisiae
MPRNPLKKEYWADVVDGFKPATSPAFENEKESTTFVTELTSKTDSAFPLSSKDSPGINQTTNDITSSDRFRRNEDTEQEDINNTNLSKDLS

SEQ ID NO: 220 - DNA, 300 bp, Saccharomyces cerevisiae
atgacgattaccgtgggggatgcagtttcggagacggagctggaaaacaaaagtcaaaacgtggtactatctcccaaggcatctgcttcttcagacataagcacagatgttgataaggacacatcgtcttcttgggatgacaaatctttgctgcctacaggtgaatatattgtggacagaaataagccccaaacctacttgaatagcgatgatatcgaaaaagtgacagaatctgatattttccctcagaaacgtctgttttcattcttgcactctaagaaaattccagaagtaccacaa

SEQ ID NO: 221 - protein, 100 aa, Saccharomyces cerevisiae
MTITVGDAVSETELENKSQNVVLSPKASASSDISTDVDKDTSSSWDDKSLLPTGEYIVDRNKPQTYLNSDDIEKVTESDIFPQKRLFSFLHSKKIPEVPQ

SEQ ID NO: 222 - DNA, 165 bp, Saccharomyces cerevisiae
atgggagaatttaaacctccgctacctcaaggcgctgggtacgctattgtattgggcctaggggccgtatttgcaggaatgatggttttgaccacttatttactgaaacgttatcaaaaggaaatcatcacagcagaagaattcaccaccgccggtagatctgta

SEQ ID NO: 223 - protein, 55 aa, Saccharomyces cerevisiae
MGEFKPPLPQGAGYAIVLGLGAVFAGMMVLTTYLLKRYQKEIITAEEFTTAGRSV

SEQ ID NO: 224 - DNA, 189 bp, Saccharomyces cerevisiae
atggaaccgctgctttttaatagtgggaaagcaaatccctctcaagatgttttcatagatgtggaagttggtgatattaccacaaaatatggttccacaaatactggatcattcagttcgatggatactgtggaagcgcaggcgataaaggcagagacggcaagattcatggaagttccacagggaaga

SEQ ID NO: 225 - protein, 63 aa, Saccharomyces cerevisiae
MEPLLFNSGKANPSQDVFIDVEVGDITTKYGSTNTGSFSSMDTVEAQAIKAETARFMEVPQGR

SEQ ID NO: 226 - DNA, 192 bp, Saccharomyces cerevisiae
atgtctgaagaagctgcctatcaagaggatacagcagtccaaaatactccagctgatgctttgtcgccagttgaatccgattctaattccgctttgtctactccatccaacaaagctgaaagagatgacatgaaagatttcgacgagaatcacgaagaatctaataactacgttgaaattccaaagaagccc

SEQ ID NO: 227 - protein, 64 aa, Saccharomyces cerevisiae
MSEEAAYQEDTAVQNTPADALSPVESDSNSALSTPSNKAERDDMKDFDENHEESNNYVEIPKKP

SEQ ID NO: 228 - DNA, 174 bp, Saccharomyces cerevisiae
atgaattcaactcccgatctaatatctcctcagaaatccaattcatccaactcatatgaattggaatctggtcgttcaaaggccatgaatactccagaaggtaaaaatgaaagttttcacgacaacttaagtgaaagtcaagtgcaacccgccgttgcccctccaaacaccgga

SEQ ID NO: 229 - protein, 58 aa, Saccharomyces cerevisiae
MNSTPDLISPQKSNSSNSYELESGRSKAMNTPEGKNESFHDNLSESQVQPAVAPPNTG

SEQ ID NO: 230 - DNA, 237 bp, Saccharomyces cerevisiae
atgtcggaacttgaaaacgctcatcaaggccccttggaagggtctgctactgtgagcacaaattctaactcatacaacgagaagtcaggaaactcgactgctcctggtaccgccggttacaacgataatttggcacaagctaaacccgtctcaagttacatttcccatgaaggccctcccaaagacgaactggaagagcttcagaaggaggttgacaaacaactagagaagaaatcg

SEQ ID NO: 231 - protein, 79 aa, Saccharomyces cerevisiae
MSELENAHQGPLEGSATVSTNSNSYNEKSGNSTAPGTAGYNDNLAQAKPVSSYISHEGPPKDELEELQKEVDKQLEKKS

SEQ ID NO: 232 - DNA, 300 bp, Saccharomyces cerevisiae
atgtctctttccaaatattttaatccaattcctgacgcttcagtcacctttgatggggctaccgttcaattggaagaatccctcggtgctgttcagaacgatgaagagtccgcatcggaattcaaaaacgtaggccatttagaaattagtgatatcacttttcgtgctaatgaaggtgaagtcgtcttagtactgggaaacccaacatcagcgctcttcaaaggtctattccatggtcacaagcatctgaaatactcgcctgaagggtctattagattcaaagacaatgagtacaaacag

SEQ ID NO: 233 - protein, 100 aa, Saccharomyces cerevisiae
MSLSKYFNPIPDASVTFDGATVQLEESLGAVQNDEESASEFKNVGHLEISDITFRANEGEVVLVLGNPTSALFKGLFHGHKHLKYSPEGSIRFKDNEYKQ

SEQ ID NO: 234 - DNA, 300 bp, Saccharomyces cerevisiae
atgaagtttgctgaccatctaaccgagtctgccatcccggaatggagggacaaatatattgattataaggtcggcaagaagaagcttcgccgctacaaggagaagctggatgccgaagaagagcaatccagctcctaccggagctggatgccctctgtgtcggtataccagactgcatttcagcagagagagcccggcaaaagtcgcagcgacggagactatcgctccggacctgcgttcaagaaggactattctgctttgcagagggagttcgttgctgacttcattgaagactggttg

SEQ ID NO: 235 - protein, 100 aa, Saccharomyces cerevisiae
MKFADHLTESAIPEWRDKYIDYKVGKKKLRRYKEKLDAEEEQSSSYRSWMPSVSVYQTAFQQREPGKSRSDGDYRSGPAFKKDYSALQREFVADFIEDWL

SEQ ID NO: 236 - DNA, 300 bp, Saccharomyces cerevisiae
atgcgatttggcctgccatcaaaattggaactcactcctccgtttaggataggcatccgaactcaactaacggcactagttagtatagtggctttgggctcactgattattctggctgtaacgacaggggtctattttacctcgaactataaaaatttaaggtccgatagactgtacattgccgctcagttaaagtcatcacagattgaccaaactctaaactacttatattaccaggcgtactatttggcatcaagagacgccctgcaaagctcactaacaagttacgttgcaggtaac

SEQ ID NO: 237 - protein, 100 aa, Saccharomyces cerevisiae
MRFGLPSKLELTPPFRIGIRTQLTALVSIVALGSLIILAVTTGVYFTSNYKNLRSDRLYIAAQLKSSQIDQTLNYLYYQAYYLASRDALQSSLTSYVAGN

SEQ ID NO: 238 - DNA, 102 bp, Saccharomyces cerevisiae
atgggtttgattgtctcaatattcaacattggctgcgccataggcggaattgtcttgtcaaaagtcggtgatatatatggtcgtcgtattggattgattaca

SEQ ID NO: 239 - protein, 34 aa, Saccharomyces cerevisiae
MGLIVSIFNIGCAIGGIVLSKVGDIYGRRIGLIT

SEQ ID NO: 240 - DNA, 300 bp, Saccharomyces cerevisiae
atggctaacgacgctctaagtgctattttcagtaatccttcgaggaaaggtgtccaaccctccacatctattgtgtcatatacaaacaatgaagatgatattatagatgtggaaaatgggaagttcaacaagaacaagaatatcaacactaatgtgtatgtggacaactcctcaatagaggagagcgaagtcgtgcccttgcccgaaacaaagtccatctggagtaaaatatactacgatttcattgtgttagacaagacaactttgaatgtttcgttgaaagagtcgttcttgtataac

SEQ ID NO: 241 - protein, 100 aa, Saccharomyces cerevisiae
MANDALSAIFSNPSRKGVQPSTSIVSYTNNEDDIIDVENGKFNKNKNINTNVYVDNSSIEESEVVPLPETKSIWSKIYYDFIVLDKTTLNVSLKESFLYN

SEQ ID NO: 242 - DNA, 210 bp, Saccharomyces cerevisiae
atgacaaggttcatgaacagctttgccaaacaaacgctgggatatggcaatatggcgacagtggagcaagagagctcagctcaggctgttgattctcattcaaacaacacaccgaagcaagctaagggtgttcttgcagaggaactaaaggatgcattgcggttccgggacgaaagagttagtattattaatgcagagccttcttcaaca

SEQ ID NO: 243 - protein, 70 aa, Saccharomyces cerevisiae
MTRFMNSFAKQTLGYGNMATVEQESSAQAVDSHSNNTPKQAKGVLAEELKDALRFRDERVSIINAEPSST

SEQ ID NO: 244 - DNA, 132 bp, Saccharomyces cerevisiae
atgcattttagaagaacgatgagtagagtgcccacattggcatctcttgaaatacgatataaaaaatctttcggccataaatttcgtgattttattgctctatgtggtcactattttgctccagttaaaaaa

SEQ ID NO: 245 - protein, 44 aa, Saccharomyces cerevisiae
MHFRRTMSRVPTLASLEIRYKKSFGHKFRDFIALCGHYFAPVKK

SEQ ID NO: 246 - DNA, 174 bp, Saccharomyces cerevisiae
atgactgatcgtaaaaccaacttgccagaagaaccgattttcgaagaggcagaagatgatggctgcccttcgatagaaaattcttcacatctgtcagtacctacagtggaggaaaacaaggacttttccgagtataatggggaagaggcagaggaagttgttgttccagaaaag

SEQ ID NO: 247 - protein, 58 aa, Saccharomyces cerevisiae
MTDRKTNLPEEPIFEEAEDDGCPSIENSSHLSVPTVEENKDFSEYNGEEAEEVVVPEK

SEQ ID NO: 248 - DNA, 162 bp, Saccharomyces cerevisiae
atgtccggtgttaataatacatccgcaaatgatttatccactaccgagtctaactctaactcagtagcaaatgcaccatctgtaaaaactgagcataatgactctaaaaactccctcaacctggatgccactgaaccacctattgacttacctcaaaaaccc

SEQ ID NO: 249 - protein, 54 aa, Saccharomyces cerevisiae
MSGVNNTSANDLSTTESNSNSVANAPSVKTEHNDSKNSLNLDATEPPIDLPQKP

SEQ ID NO: 250 - DNA, 300 bp, Saccharomyces cerevisiae
atgttcacttttctcaaaattattctgtggcttttttccttggcattggcctctgctataaatatcaacgatatcacattttccaatttagaaattactccactgactgcaaataaacaacctgatcaaggttggactgccacttttgattttagtattgcagatgcgtcttccattagggagggcgatgaattcacattatcaatgccacatgtttataggattaagctattaaactcatcgcaaacagctactatttccttagcggatggtactgaggctttcaaatgctatgtttcg

SEQ ID NO: 251 - protein, 100 aa, Saccharomyces cerevisiae
MFTFLKIILWLFSLALASAININDITFSNLEITPLTANKQPDQGWTATFDFSIADASSIREGDEFTLSMPHVYRIKLLNSSQTATISLADGTEAFKCYVS

SEQ ID NO: 252 - DNA, 225 bp, Saccharomyces cerevisiae
atgccaacaacttatgtgccaataaatcaaccaattggggatggtgaagatgtcattgacaccaatcgattcaccaatattccagaaacgcaaaattttgaccaatttgttacaattgataagattgctgaggaaaatagaccactgtctgtagactcggacagggagttccttaattcaaaatatcgacattaccgagaggttatatgggaccgtgcaaaaaca

SEQ ID NO: 253 - protein, 75 aa, Saccharomyces cerevisiae
MPTTYVPINQPIGDGEDVIDTNRFTNIPETQNFDQFVTIDKIAEENRPLSVDSDREFLNSKYRHYREVIWDRAKT

SEQ ID NO: 254 - DNA, 237 bp, Saccharomyces cerevisiae
atgtcagcggatgctagtacaaattcgaatgcttccctagacgaaaaaaatttaaacatcacttcagaagctgaaatcaagaatgaagacgtaaccgcggagccagttctaagcacggtactatcacccaacggtaaaattgtctacatcagtgacaaggttgatgaggccatgaagttggctgaagaagccaaagaaatcgaagtgacaccagaagaagatagaaaacttcgttgg

SEQ ID NO: 255 - protein, 79 aa, Saccharomyces cerevisiae
MSADASTNSNASLDEKNLNITSEAEIKNEDVTAEPVLSTVLSPNGKIVYISDKVDEAMKLAEEAKEIEVTPEEDRKLRW

SEQ ID NO: 256 - DNA, 156 bp, Saccharomyces cerevisiae; identical to SEQ ID NO: 156

SEQ ID NO: 257 - protein, 52 aa, Saccharomyces cerevisiae; identical to SEQ ID NO: 157

SEQ ID NO: 258 - DNA, 255 bp, Saccharomyces cerevisiae; identical to SEQ ID NO: 158

SEQ ID NO: 259 - protein, 85 aa, Saccharomyces cerevisiae; identical to SEQ ID NO: 159

SEQ ID NO: 260 - DNA, 102 bp, Saccharomyces cerevisiae
atgtcatacaagtcagcaataatagggctttgtttgctagctgtgatactattagctccccctttagcatggcattcacataccaagaatattccagcaatc

SEQ ID NO: 261 - protein, 34 aa, Saccharomyces cerevisiae
MSYKSAIIGLCLLAVILLAPPLAWHSHTKNIPAI

SEQ ID NO: 262 - DNA, 225 bp, Saccharomyces cerevisiae
atgaactttttaagttttaagactacaaaacactatcacattttcaggtacgtgaacatacggaatgactacaggctgttaatgataatgataataggtaccgtggcaacaggcctagtgccggcaattacttctatcctgacgggcagagtgttcgatctactatcagttttcgtggctaatgggtcacatcaaggtttgtattcccaactagtacagaggtca

SEQ ID NO: 263 - protein, 75 aa, Saccharomyces cerevisiae
MNFLSFKTTKHYHIFRYVNIRNDYRLLMIMIIGTVATGLVPAITSILTGRVFDLLSVFVANGSHQGLYSQLVQRS

SEQ ID NO: 264 - DNA, 300 bp, Saccharomyces cerevisiae
atgcattggacgtccatcttgagcgctattttgcttttctgcctgtcaggagcaagagcatcacctgcaaagacagttattcgtaacaaggtgcccttgcttgtcactaatgcctgcacgaggatttttcaaaaagttacttgggagtataccagcaagtctaagcgttcatcaccagtatgttcttacgaaccagcgtttcaatcaatgctgtattgtatctatgaaacgttggatgaaaaaggttattcgaataaaaccttagaaaaaacatttagtaccatcaaaaaaaactgtgca

SEQ ID NO: 265 - protein, 100 aa, Saccharomyces cerevisiae
MHWTSILSAILLFCLSGARASPAKTVIRNKVPLLVTNACTRIFQKVTWEYTSKSKRSSPVCSYEPAFQSMLYCIYETLDEKGYSNKTLEKTFSTIKKNCA

SEQ ID NO: 266 - DNA, 276 bp, Saccharomyces cerevisiae
atgagtaatacttcttcgtacgagaagaataatccagataatctgaaacacaatggtattaccatagattctgagtttctaactcaggagccaataaccattccctcaaatggctccgctgtttctattgacgaaacaggttcagggtccaaatggcaagactttaaagattctttcaaaagggtaaaacctattgaagttgatcctaatctttcagaagctgaaaaagtggctatcatcactgcccaaactccattgaagcaccacttgaagaat

SEQ ID NO: 267 - protein, 92 aa, Saccharomyces cerevisiae
MSNTSSYEKNNPDNLKHNGITIDSEFLTQEPITIPSNGSAVSIDETGSGSKWQDFKDSFKRVKPIEVDPNLSEAEKVAIITAQTPLKHHLKN

SEQ ID NO: 268 - DNA, 141 bp, Saccharomyces cerevisiae
atgccaacagctaagaggacgtcatccagggcttcgttggcactgcccttccagttacggttggtgcacaagaaatcatggggccatcggctaagagacttcatttccgggttcttaaaatcatgcagacccattgctaaa

SEQ ID NO: 269 - protein, 47 aa, Saccharomyces cerevisiae
MPTAKRTSSRASLALPFQLRLVHKKSWGHRLRDFISGFLKSCRPIAK

SEQ ID NO: 270 - DNA, 300 bp, Saccharomyces cerevisiae
atgctcaaccatcccagccaaggctcagatgatgctcaggacgaaaagcaaggcgacttcccggtcatcgaagaggagaagacccaggctgtaacgctgaaggattcgtatgttagcgacgacgtcgccaactccacggaacgctacaacttgtccccttctccggaggacgaagacttcgaaggccccactgaagaagaaatgcagactttaaggcacgttggtggtaaaattcctatgaggtgttggttaattgctattgtagagctttccgagagattctcctactacgggctttcc

SEQ ID NO: 271 - protein, 100 aa, Saccharomyces cerevisiae
MLNHPSQGSDDAQDEKQGDFPVIEEEKTQAVTLKDSYVSDDVANSTERYNLSPSPEDEDFEGPTEEEMQTLRHVGGKIPMRCWLIAIVELSERFSYYGLS

SEQ ID NO: 272 - DNA, 201 bp, Saccharomyces cerevisiae
atggcagttgaggagaacaatatgcctgttgtttcacagcaaccccaagctggtgaagacgtgatctcttcactcagtaaagattcccatttaagcgcacaatctcaaaagtattctaatgatgaattgaaagccggtgagtcagggtctgaaggctcccaaagtgttcctatagagatacccaagaagcccatgtctgaa

SEQ ID NO: 273 - protein, 67 aa, Saccharomyces cerevisiae
MAVEENNMPVVSQQPQAGEDVISSLSKDSHLSAQSQKYSNDELKAGESGSEGSQSVPIEIPKKPMSE

SEQ ID NO: 274 - DNA, 102 bp, Saccharomyces cerevisiae
atggaagctatttcacaattacgtggtgttccattgacacaccaaaaggactttagctgggtctttttagtagattggattctcacggtagtagtatgtttg

SEQ ID NO: 275 - protein, 34 aa, Saccharomyces cerevisiae
MEAISQLRGVPLTHQKDFSWVFLVDWILTVVVCL

SEQ ID NO: 276 - DNA, 300 bp, Saccharomyces cerevisiae
atgaaacttcaattggcggcagtggctacattagcagtcttaactagtccggcattcggtagagtacttcccgatgggaaatacgtcaagattcccttcacaaaaaaaaagaacggcgacaatggtgaactcagcaagagatcgaacggccatgaaaaatttgtactagctaacgagcaaagcttttattctgttgagctagccattggtacaccttcacaaaacctcactgtgctgttagacacaggctcagctgacttatgggttcctggcaagggaaacccctactgcggttctgtg

SEQ ID NO: 277 - protein, 100 aa, Saccharomyces cerevisiae
MKLQLAAVATLAVLTSPAFGRVLPDGKYVKIPFTKKKNGDNGELSKRSNGHEKFVLANEQSFYSVELAIGTPSQNLTVLLDTGSADLWVPGKGNPYCGSV

SEQ ID NO: 278 - DNA, 108 bp, Saccharomyces cerevisiae
atggctatctgggagcaactagaagtctcaaaggcgcacgttgcttatgcatgtgttggtgtcttttcatctatcttctctttagtgtcactttatgtcaaggagaag

SEQ ID NO: 279 - protein, 36 aa, Saccharomyces cerevisiae
MAIWEQLEVSKAHVAYACVGVFSSIFSLVSLYVKEK

SEQ ID NO: 280 - DNA, 291 bp, Saccharomyces cerevisiae
atggttagaacccgtgtattattctgcttatttatatctttttttgctacggttcaatcgagtgctacacttattagcacttcatgtatttcccaagctgcgctataccaatttggatgttctagtaaatctaaaagttgctactgtaaaaacatcaattggctgggttcagtgacagcatgtgcctatgagaattccaaatctaacaaaacactagacagcgccttaatgaagttagcatcccaatgttcaagcatcaaagtttatactttagaggacatgaagaatatt

SEQ ID NO: 281 - protein, 97 aa, Saccharomyces cerevisiae
MVRTRVLFCLFISFFATVQSSATLISTSCISQAALYQFGCSSKSKSCYCKNINWLGSVTACAYENSKSNKTLDSALMKLASQCSSIKVYTLEDMKNI

SEQ ID NO: 282 - DNA, 300 bp, Saccharomyces cerevisiae
atgatttgcataacgtgcatgcggcccgtagattccctttatacagtgtactcgaatgaccacattcagctgacagattgtccatattgccaagagacagtagacaaatatgttgagatagataatgtcctgttattcattgatttgcttctattaaaagcaggtgcatatagacacttggtattcaatgctttggaattgcatctctcaaaatatccgaaaagaaaagcgctaaatgattgccagtgtttgcgtgactatacgcaagctttgttatttaacgtaaagaactggttttgt

SEQ ID NO: 283 - protein, 100 aa, Saccharomyces cerevisiae
MICITCMRPVDSLYTVYSNDHIQLTDCPYCQETVDKYVEIDNVLLFIDLLLLKAGAYRHLVFNALELHLSKYPKRKALNDCQCLRDYTQALLFNVKNWFC

SEQ ID NO: 284 - DNA, 300 bp, Saccharomyces cerevisiae
atgaacactgatcaacaaccttatcagggccaaacggactatacccagggaccaggtaacgggcaaagtcaggaacaagactatgaccaatatggccagcctttgtatccttcacaagctgatggttactacgatccaaatgtcgctgctggtactgaagctgatatgtatggtcaacaaccaccaaacgagtcttacgaccaagactacacaaacggtgaatactatggtcaaccgccaaatatggctgctcaagacggtgaaaacttctcggattttagcagttacggccctcctgga

SEQ ID NO: 285 - protein, 100 aa, Saccharomyces cerevisiae
MNTDQQPYQGQTDYTQGPGNGQSQEQDYDQYGQPLYPSQADGYYDPNVAAGTEADMYGQQPPNESYDQDYTNGEYYGQPPNMAAQDGENFSDFSSYGPPG

SEQ ID NO: 286 - DNA, 300 bp, Saccharomyces cerevisiae
atggtggataaaaataggacgttgcatgaattatcttccaaaaatttcagcagaacgccgaatggactgatctttaccaatgatttaaagacagtatattccatttttctaatttgtttggatttgaaagagaaaaaacatagtagtgacactaagtctttcttattaactgcattcactaaacatttccacttcacttttacatatcaggaagctattaaagcaatgggacaattggaactaaaagtggatatgaacacaacttgtattaacgtttcatataatattaaacctagtttg

SEQ ID NO: 287 - protein, 100 aa, Saccharomyces cerevisiae
MVDKNRTLHELSSKNFSRTPNGLIFTNDLKTVYSIFLICLDLKEKKHSSDTKSFLLTAFTKHFHFTFTYQEAIKAMGQLELKVDMNTTCINVSYNIKPSL

SEQ ID NO: 288 - DNA, 300 bp, Saccharomyces cerevisiae
atgggcaatcagtcattagttgtgcttacggaaagtaagggtgagtatgagaatgagacagaactacctgttaaaaaatcgtcacgagataataatatcggagaatctttaacagcaacagcttttacgcagtctgaagatgaaatggtagatagcaatcagaaatggcagaacccaaactattttaaatatgcatggcaagaatatctttttatattcacatgcatgataagtcagcttctaaatcaagcaggcactacacagactctttcgatcatgaatattctttcggacagtttt

SEQ ID NO: 289 - protein, 100 aa, Saccharomyces cerevisiae
MGNQSLVVLTESKGEYENETELPVKKSSRDNNIGESLTATAFTQSEDEMVDSNQKWQNPNYFKYAWQEYLFIFTCMISQLLNQAGTTQTLSIMNILSDSF

SEQ ID NO: 290 - DNA, 222 bp, Saccharomyces cerevisiae
atgagttccgtcaataaagatactattcatgttgctgaaagaagtcttcataaagaacaccttaccgaaggtggtaacatggccttccacaaccatttgaatgattttgctcatattgaagatcctctggaaagaagaagattggctttggagtccatcgatgacgaaggtttcggttggcaacaagttaagaccatctccattgctggtgttggtttcttg

SEQ ID NO: 291 - protein, 74 aa, Saccharomyces cerevisiae
MSSVNKDTIHVAERSLHKEHLTEGGNMAFHNHLNDFAHIEDPLERRRLALESIDDEGFGWQQVKTISIAGVGFL

SEQ ID NO: 292 - DNA, 147 bp, Saccharomyces cerevisiae
atgtctgaattcgctactagccgcgttgaaagtggctctcaacaaacttctatccactctactccgatagtgcagaaattagagacggatgaatctcctattcaaaccaaatctgaatacactaacgctgaactcccagcaaagcca

SEQ ID NO: 293 - protein, 49 aa, Saccharomyces cerevisiae
MSEFATSRVESGSQQTSIHSTPIVQKLETDESPIQTKSEYTNAELPAKP

SEQ ID NO: 294 - DNA, 300 bp, Saccharomyces cerevisiae
atgactaacgctttgctctctatagccgttttgcttttctcgatgctctcgctagcacaagcggagacgcacacgtttaattggaccactggctgggactacaggaacgttgatgggctaaagagccgtcccgtgatcacctgtaatggccagttcccatggccagatataacggtcaacaaaggtgaccgtgtgcagatttacttgaccaacggaatgaacaacaccaatacttctatgcatttccacggtctcttccaaaacggaaccgcctctatggacggtgtgcccttcttgacg

SEQ ID NO: 295 - protein, 100 aa, Saccharomyces cerevisiae
MTNALLSIAVLLFSMLSLAQAETHTFNWTTGWDYRNVDGLKSRPVITCNGQFPWPDITVNKGDRVQIYLTNGMNNTNTSMHFHGLFQNGTASMDGVPFLT

SEQ ID NO: 296 - DNA, 300 bp, Saccharomyces cerevisiae
atgagcaacgctaatccttatgagaataacaatccgtacgctgaaaactatgaaatgcaagaggacttgaacaatgctcctactggtcactcagatggtagcgacgatttcgtagcttttatgaacaagatcaactcaataaatgctaacttgtccaggtacgaaaacattatcaaccaaattgatgcgcaacacaaagacctacttactcaagtgagtgaggaacaggagatggaattgagacgttctttggacgattacatctctcaggccacagatttgcagtatcaattgaaagcg

SEQ ID NO: 297 - protein, 100 aa, Saccharomyces cerevisiae
MSNANPYENNNPYAENYEMQEDLNNAPTGHSDGSDDFVAFMNKINSINANLSRYENIINQIDAQHKDLLTQVSEEQEMELRRSLDDYISQATDLQYQLKA

SEQ ID NO: 298 - DNA, 114 bp, Saccharomyces cerevisiae
atgatcaccggtaaagaattgagaatcatctctcttttgaccttagacacggtttttttcctattggaaattaccataggttatatgtcacattcattggccttgattgccgat

SEQ ID NO: 299 - protein, 38 aa, Saccharomyces cerevisiae
MITGKELRIISLLTLDTVFFLLEITIGYMSHSLALIAD

SEQ ID NO: 300 - DNA, 300 bp, Saccharomyces cerevisiae
atgttgtttaaatccctttcaaagttagcaaccgctgctgctttttttgctggcgtcgcaactgcggacgatgttccagcgattgaagttgttggtaataagtttttctactccaacaacggtagtcagttctacataagaggtgttgcttatcaggctgataccgctaatgaaactagcggatctactgtcaacgatcctttggccaattatgagagttgttccagagatattccatacctcaaaaaattgaacacaaatgttatccgtgtctacgctatcaataccactctagatcac

SEQ ID NO: 301 - protein, 100 aa, Saccharomyces cerevisiae
MLFKSLSKLATAAAFFAGVATADDVPAIEVVGNKFFYSNNGSQFYIRGVAYQADTANETSGSTVNDPLANYESCSRDIPYLKKLNTNVIRVYAINTTLDH

SEQ ID NO: 302 - DNA, 276 bp, Saccharomyces cerevisiae
atgggtaaaattgcagagtttctcgggaatccaggtgctaggcctgacgttcatcatagagcacctactgttgactgcaaacagtacgaagaattcggtgattctaacgattacaaaaatgatgatgtggtcagagtagtcagccatagcgatgagagtactgatgacgaactttgtaatgtgaatttaacagaaacaggggcaatcttcacgagtaaaggttttaccgggttaagcaaaggtttcacagataagaccctggatttcctggtacga

SEQ ID NO: 303 - protein, 92 aa, Saccharomyces cerevisiae
MGKIAEFLGNPGARPDVHHRAPTVDCKQYEEFGDSNDYKNDDVVRVVSHSDESTDDELCNVNLTETGAIFTSKGFTGLSKGFTDKTLDFLVR

SEQ ID NO: 304 - DNA, 102 bp, Saccharomyces cerevisiae
atgtcttacaattttacaggtacgcctacaggcgaaggaacgggtggtaactcgttgacaacagatttgaatacacaatttgacttggccaacatgggatgg

SEQ ID NO: 305 - protein, 35 aa, Saccharomyces cerevisiae
MSYNFTGTPTGEGTGGNSLTTDLNTQFDLANMGWI

SEQ ID NO: 306 - DNA, 300 bp, Saccharomyces cerevisiae
atgagtgatcaaaataatcgatcgagaaatgaatatcactcaaaccggaagaatgaaccttcctatgaactccaaaatgcacatagcgggctatttcactcttctaatgaagaattaacaaacaggaaccaaagatataccaatcaaaatgccagcatgggttcattcactccagtccaatctttgcaatttccagaacaatctcagcaaacaaatatgctttataacggtgacgatggcaataataatactatcaatgataacgaacgagacatatatggaggttttgtcaaccaccat

SEQ ID NO: 307 - protein, 100 aa, Saccharomyces cerevisiae
MSDQNNRSRNEYHSNRKNEPSYELQNAHSGLFHSSNEELTNRNQRYTNQNASMGSFTPVQSLQFPEQSQQTNMLYNGDDGNNNTINDNERDIYGGFVNHH

SEQ ID NO: 308 - DNA, 300 bp, Saccharomyces cerevisiae
atgggcaggtttagtaacataataacgtccaataaatgggacgagaaacaaaacaacattggcgaacagagcatgcaggaattaccagaagaccagatagaacatgagatggaagcaatagatccaagtaataagacgaccccatactctattgatgagaaacagtacaacacaaaaaagaagcatgggtcattgcaaggtggcgcaattgctgatgtaaattcgataactaattcgttaacaagattgcaagttgtctctcatgaaacagatattaacgaggatgaagaagaagcccac

SEQ ID NO: 309 - protein, 100 aa, Saccharomyces cerevisiae
MGRFSNIITSNKWDEKQNNIGEQSMQELPEDQIEHEMEAIDPSNKTTPYSIDEKQYNTKKKHGSLQGGAIADVNSITNSLTRLQVVSHETDINEDEEEAH

SEQ ID NO: 310 - DNA, 216 bp, Saccharomyces cerevisiae
atggatgaaactgtgaacatacaaatgtccaaggaaggtcagtatgaaatcaattctagctctataataaaagaggaggagtttgtagatgaacaatattctggggagaacgttacgaaggccatcaccacagagagaaaagtcgaggatgatgctgctaaggaaacagagagctcaccacaagaaagaagagaggtgaagcggaagttaaagcag

SEQ ID NO: 311 - protein, 72 aa, Saccharomyces cerevisiae
MDETVNIQMSKEGQYEINSSSIIKEEEFVDEQYSGENVTKAITTERKVEDDAAKETESSPQERREVKRKLKQ

SEQ ID NO: 312 - DNA, 168 bp, Saccharomyces cerevisiae
atgactgctcagattccgtatcaacatagctcgggatacatctctcattttcacaataatgagcttgatgcaggcaggggaagggattataatgtaaccattaagtatctagatgataaagaagaaaatatagaaggccaagcagcaaagattagtcacaatgcgagt

SEQ ID NO: 313 - protein, 56 aa, Saccharomyces cerevisiae
MTAQIPYQHSSGYISHFHNNELDAGRGRDYNVTIKYLDDKEENIEGQAAKISHNAS

SEQ ID NO: 314 - DNA, 300 bp, Saccharomyces cerevisiae
atgatgcgtcgcacgctattacattcattcgctacgctgctactttctttgtcgttgtggtcagctgcggtcatggcagctgtgacaactcaggttacagtggtaacaaatgtcgcaggggccctggttacggagaccacaatatgggaccctgccaccgctgctgctgctgctacaactaccgctcaaacaggtttcttcactacggtattcactaccactaacgatgtcggaaccaccgtcactcttactcagacagtcaacagagccactatgctaccaaccacgacgacttctacc

SEQ ID NO: 315 - protein, 100 aa, Saccharomyces cerevisiae
MMRRTLLHSFATLLLSLSLWSAAVMAAVTTQVTVVTNVAGALVTETTIWDPATAAAAATTTAQTGFFTTVFTTTNDVGTTVTLTQTVNRATMLPTTTTST

SEQ ID NO: 316 - DNA, 147 bp, Saccharomyces cerevisiae
atgacattatctttcgctcattttacctacctgttcacaatattgttgggattaactaatattgccttggcatctgatccagaaacgattctagtgacgataaccaagacaaacgatgcaaatggggttgttacaactacagtttca

SEQ ID NO: 317 - protein, 49 aa, Saccharomyces cerevisiae
MTLSFAHFTYLFTILLGLTNIALASDPETILVTITKTNDANGVVTTTVS

SEQ ID NO: 318 - DNA, 147 bp, Saccharomyces cerevisiae
atgcaatcatccactgaaagtgatagagatattcaggatggtcctgatgctgatattcacgtcgcaccacccgtggaaaaagagtggtcagatggatttgatgacaacgaagtcataaacggggataacgttgagccaccaaaaaga

SEQ ID NO: 319 - protein, 49 aa, Saccharomyces cerevisiae
MQSSTESDRDIQDGPDADIHVAPPVEKEWSDGFDDNEVINGDNVEPPKR

SEQ ID NO: 320 - DNA, 252 bp, Saccharomyces cerevisiae
atgaccgaagactttatttcttctgtcaagcgttcaaatgaggagctgaaggagcgaaaatctaactttggatttgtagaatacaaatccaagcaattaacatcatcctcatcacacaattcaaactcatcgcatcacgatgatgacaaccaacacggcaagaggaatattttccagcgatgtgttgattctttcaagtctcctctggacggctcgttcgacacaagtaatttgaagaggactctgaaacca

SEQ ID NO: 321 - protein, 84 aa, Saccharomyces cerevisiae
MTEDFISSVKRSNEELKERKSNFGFVEYKSKQLTSSSSHNSNSSHHDDDNQHGKRNIFQRCVDSFKSPLDGSFDTSNLKRTLKP

SEQ ID NO: 322 - DNA, 300 bp, Saccharomyces cerevisiae
atgtcccagcccactaagaataagaagaaagaacacgggaccgattccaagtcatcccgcatgactcggacgttggttaatcatattctttttgaaagaattctcccgatccttccggtggagtctaatctaagtacctattcggaagtggaagagtattcctcattcatttcatgcagatctgtgctcattaacgttaccgtttcccgagatgcaaatgctatggtggaaggcaccttggagttgatagaatcgcttcttcaagggcacgaaatcatttcagataagggtagcagtgac

SEQ ID NO: 323 - protein, 100 aa, Saccharomyces cerevisiae
MSQPTKNKKKEHGTDSKSSRMTRTLVNHILFERILPILPVESNLSTYSEVEEYSSFISCRSVLINVTVSRDANAMVEGTLELIESLLQGHEIISDKGSSD

SEQ ID NO: 324 - DNA, 291 bp, Saccharomyces cerevisiae
atgaagaattcgacagctgctagttccagatggacgaagagtcgtctctcccatttctttccctcgtacactaatagcagtggtatgggggccgcctcaactgatcaatcttctacgcagggagaagaactgcaccataggaagcactgtgaagaagacaatgatggtcaaaaaccgaaaaagtctcccgtatccacctctacaatgcaaataaaatctagacaggatgaggacgaggatgacggtcgaattgtcattaaaccagttaacgatgaagatgatacatcagtg

SEQ ID NO: 325 - protein, 97 aa, Saccharomyces cerevisiae
MKNSTAASSRWTKSRLSHFFPSYTNSSGMGAASTDQSSTQGEELHHRKHCEEDNDGQKPKKSPVSTSTMQIKSRQDEDEDDGRIVIKPVNDEDDTSV

SEQ ID NO: 326 - DNA, 213 bp, Saccharomyces cerevisiae
atggtgaacgttggtccttctcatgctgcagttgctgtggatgctagcgaagcccgcaaaagaaatatttcagaagaagtattcgaactgagggataagaaagattctacagtggtaattgagggtgaagccccggtaagaacttttaccagtagctctagtaaccatgaaagagaggatacgtatgtttctaaaaggcaggtaatgagagat

SEQ ID NO: 327 - protein, 71 aa, Saccharomyces cerevisiae
MVNVGPSHAAVAVDASEARKRNISEEVFELRDKKDSTVVIEGEAPVRTFTSSSSNHEREDTYVSKRQVMRD

SEQ ID NO: 328 - DNA, 300 bp, Saccharomyces cerevisiae
atgtcatcatcctcaagttcatcagagtcatcgcctaatttatcgcggtcaaactcactggctaacacgatggtttccatgaaaacagaagaccatacgggattgtacgaccataggcagcaccctgactcactgccggtccgtcaccaacctccaacattgaagaacaaggaaattgctaagtccactaaaccttctattcctaaggagcagaagagtgcaacgagatacaacagccatgtggatgtgggaagcgtacccagtaggggccgcatggattttgaagatgaagggcagggt

SEQ ID NO: 329 - protein, 100 aa, Saccharomyces cerevisiae
MSSSSSSSESSPNLSRSNSLANTMVSMKTEDHTGLYDHRQHPDSLPVRHQPPTLKNKEIAKSTKPSIPKEQKSATRYNSHVDVGSVPSRGRMDFEDEGQG

SEQ ID NO: 330 - DNA, 162 bp, Saccharomyces cerevisiae
atgtcaggtgttaataatacatccgcaaatgagttatctactaccatgtctaactctaactcagcagtaggcgctccctctgttaagactgaacacggtgactctaaaaattcccttaacctagatgccaatgagccacctattgacttacctcaaaaaccc

SEQ ID NO: 331 - protein, 54 aa, Saccharomyces cerevisiae
MSGVNNTSANELSTTMSNSNSAVGAPSVKTEHGDSKNSLNLDANEPPIDLPQKP

SEQ ID NO: 332 - DNA, 300 bp, Saccharomyces cerevisiae
atgagaccgaacaaaacaagtctgcttctggcgttattatccattttatcgcaagcgaacgcctatgaatacgtgaattgttttagctcactaccctctgacttttcaaaggccgattcatataactggcagtcgagttcacactgtaacagtgagtgtagcgcaaaaggtgcaagctactttgccctttataatcattcagaatgttattgtggtgatactaatccatctggttcggaatctacttcctcttcatgtaatacgtattgctttggttacagcagtgagatgtgtggtggt

SEQ ID NO: 333 - protein, 100 aa, Saccharomyces cerevisiae
MRPNKTSLLLALLSILSQANAYEYVNCFSSLPSDFSKADSYNWQSSSHCNSECSAKGASYFALYNHSECYCGDTNPSGSESTSSSCNTYCFGYSSEMCGG

SEQ ID NO: 334 - DNA, 300 bp, Saccharomyces cerevisiae
atgcccgaggccaagcttaacaataacgtcaacgacgttactagctactcctccgcgtcttcttctactgaaaacgctgctgatctacacaattataatgggttcgatgagcatacagaagctcgaatccaaaaactggcaaggactctgaccgcacagagtatgcaaaactccactcaatcggcacccaacaaaagtgatgctcagtctatattttctagcggtgtggaaggtgtaaacccgatattctctgatcctgaagctccaggctatgacccaaaattggaccccaactccgaa

SEQ ID NO: 335 - protein, 100 aa, Saccharomyces cerevisiae
MPEAKLNNNVNDVTSYSSASSSTENAADLHNYNGFDEHTEARIQKLARTLTAQSMQNSTQSAPNKSDAQSIFSSGVEGVNPIFSDPEAPGYDPKLDPNSE

SEQ ID NO: 336 - DNA, 300 bp, Saccharomyces cerevisiae
atgttgcaagcgccctcaagttcaaactcgggtttgaatcaaggaaatgctgcgccggacggcccacctaacgaaacacagccgtacgaaggcctcgacgcggcagctcaagaagaaataaaagaattggcaagaacgctgacgagccaatcttcccttttatcgcaagaaaagcgtattaccggcactggcgacccgaatacactaactgctgcttcttcatcgtcattgagccggtcaattttcgctagtgatatcaagggagttaacccaatccttttggacgtcaatgatccagac

SEQ ID NO: 337 - protein, 100 aa, Saccharomyces cerevisiae
MLQAPSSSNSGLNQGNAAPDGPPNETQPYEGLDAAAQEEIKELARTLTSQSSLLSQEKRITGTGDPNTLTAASSSSLSRSIFASDIKGVNPILLDVNDPD

SEQ ID NO: 338 - DNA, 300 bp, Saccharomyces cerevisiae
atggtaaatatactgcccttccacaagaacaatagacacagcgcgggagtcgtcacctgcgcggacgatgttagcggcgacggtagcggcggcgacaccaagaaggaggaggatgttgtccaggtaacggaatcaccatcgtccgggtcgcgcaataatcatcgcagcgacaatgaaaaagatgacgccatccgtatggagaaaatatctaagaaccagtccgcgtcgtccaacggcaccatccgcgaggatttgattatggacgtggacttggagaaatcgccctccgtcgatggcgat

SEQ ID NO: 339 - protein, 100 aa, Saccharomyces cerevisiae
MVNILPFHKNNRHSAGVVTCADDVSGDGSGGDTKKEEDVVQVTESPSSGSRNNHRSDNEKDDAIRMEKISKNQSASSNGTIREDLIMDVDLEKSPSVDGD

SEQ ID NO: 340 - DNA, 300 bp, Saccharomyces cerevisiae
atgtcttccactgaagcaaagcaatacaaggagaaaccctcgaaagagtacctccatgccagtgatggcgatgaccctgcaaataattctgccgcttcttcgtcatcttcgtcttctacatcaacttccgcctcgtcatcggctgcagccgttccacggaaggccgcagccgcttctgccgctgatgattctgactcagatgaagatatagaccaattgattgatgaactacaatctaactacggtgagggtgatgaatctggtgaagaagaagtacgtactgatggggtgcacgctggc

SEQ ID NO: 341 - protein, 100 aa, Saccharomyces cerevisiae
MSSTEAKQYKEKPSKEYLHASDGDDPANNSAASSSSSSSTSTSASSSAAAVPRKAAAASAADDSDSDEDIDQLIDELQSNYGEGDESGEEEVRTDGVHAG

SEQ ID NO: 342 - DNA, 135 bp, Saccharomyces cerevisiae
atggttgccaattgggtacttgctcttacgaggcagtttgaccccttcatgtttatgatggtcatgggtgtcggcatttcatcgaatattctatatagcttcccatatcctgcaaggtggctaagaatatgctcc

SEQ ID NO: 343 - protein, 45 aa, Saccharomyces cerevisiae
MVANWVLALTRQFDPFMFMMVMGVGISSNILYSFPYPARWLRICS

SEQ ID NO: 344 - DNA, 300 bp, Saccharomyces cerevisiae
atggtgaatactaggggctacactactcttccgaatgttgaagaaccagcaaataactcacaagatgagctaaactcgcaggactttgagcaagctataggaatgccatcagaacccccggtatatgtggaagagatggggatggaagaaccgcaggctccggaagcctttagtgagaaagtccagcgatttcgtatgtgttttgaaaataacgtggtgattccagtaaagaaaaatgtagtggatccgctagcacaaatgatttccctggcctctgagaaattcgatttgttcttaagt

SEQ ID NO: 345 - protein, 100 aa, Saccharomyces cerevisiae
MVNTRGYTTLPNVEEPANNSQDELNSQDFEQAIGMPSEPPVYVEEMGMEEPQAPEAFSEKVQRFRMCFENNVVIPVKKNVVDPLAQMISLASEKFDLFLS

SEQ ID NO: 346 - DNA, 300 bp, Saccharomyces cerevisiae
atgagttataataatccgtaccagttggaaaccccttttgaagagtcatacgagttggacgaaggttcgagcgctatcggtgctgaaggccacgatttcgtgggcttcatgaataagatcagtcaaatcaatcgcgatctcgataagtacgaccataccatcaaccaggtcgattctttgcataagaggctactgaccgaagttaatgaggagcaagcaagtcacttaaggcactccctggacaacttcgtcgcacaagccacggacttgcagttcaaactgaaaaatgagattaaaagt

SEQ ID NO: 347 - protein, 100 aa, Saccharomyces cerevisiae
MSYNNPYQLETPFEESYELDEGSSAIGAEGHDFVGFMNKISQINRDLDKYDHTINQVDSLHKRLLTEVNEEQASHLRHSLDNFVAQATDLQFKLKNEIKS

SEQ ID NO: 348 - DNA, 270 bp, Saccharomyces cerevisiae
atgaagatgcctctaaagaagatgtttaccagcacgtctcctcgtaactcttcttctcttgacagtgatcatgacgcttactattcgaaacaaaatcctgacaatttccctgtaaaggagcaagaaatctataacattgacctggaagaaaacaatgtgtcctctcgttcatccacctctacatcaccttcagcaagggacgactctttcgcagttccagatggtaaagacgaaaacacgcggttgaggaaagatttaaaggcaagacat

SEQ ID NO: 349 - protein, 90 aa, Saccharomyces cerevisiae
MKMPLKKMFTSTSPRNSSSLDSDHDAYYSKQNPDNFPVKEQEIYNIDLEENNVSSRSSTSTSPSARDDSFAVPDGKDENTRLRKDLKARH

SEQ ID NO: 350 - DNA, 243 bp, Saccharomyces cerevisiae
atggatatactcaagaggggaaatgaatcggacaagtttacgaaaatagagacagaatctactacgataccaaatgactcggatagatctggttcactgatcagaagaatgaaggattccttcaagcaaagtaacctgcatgtcattccagaagaccttgaaaacagcgaacagacagagcaggaaaaaatccaatggaaactagcttctcagccctatcaaaaagtcttgagccaaaggcac

SEQ ID NO: 351 - protein, 81 aa, Saccharomyces cerevisiae
MDILKRGNESDKFTKIETESTTIPNDSDRSGSLIRRMKDSFKQSNLHVIPEDLENSEQTEQEKIQWKLASQPYQKVLSQRH

SEQ ID NO: 352 - DNA, 456 bp, Saccharomyces cerevisiae
atggaaggtatgaatatgggtagcagcatgaatatggacgccatgtctagtgcatccaagacagtagcatcgagtatggcgtcgatgagcatggatgcgatgtctagtgccagcaaaacgatattatcgagcatgtcatcgatgagcatggaagcgatgtccagtgcgagcaaaacgttggcgtcgactatgtcgtcaatggcaagtatgtcgatgggaagcagttcaatgtcaggtatgtctatgtcgatgagcagtacaccaacaagctccgccagtgcacagacaacttctgattctagcatgtcaggcatgtcaggtatgtcatcgtctgataacagtagctcttcagggatggatatggacatgagtatgggaatgaactattatctgactcccacatataaaaactatccagttttgtttcaccatttgcatgcaaacaatagtggtaag

SEQ ID NO: 353 - protein, 152 aa, Saccharomyces cerevisiae
MEGMNMGSSMNMDAMSSASKTVASSMASMSMDAMSSASKTILSSMSSMSMEAMSSASKTLASTMSSMASMSMGSSSMSGMSMSMSSTPTSSASAQTTSDSSMSGMSGMSSSDNSSSSGMDMDMSMGMNYYLTPTYKNYPVLFHHLHANNSGK

SEQ ID NO: 354 - DNA, 201 bp, Saccharomyces cerevisiae
atgtcagaagatcaaaaaagtgaaaattcggtaccttctaaggttaatatggtgaatcgcaccgatatactgactacgatcaagtcattgtcatggcttgacttgatgttgccatttactataattctctccataatcattgcagtaataatttctgtctatgtgccttcttcccgtcacacttttgacgctgaaggtcat

SEQ ID NO: 355 - protein, 67 aa, Saccharomyces cerevisiae
MSEDQKSENSVPSKVNMVNRTDILTTIKSLSWLDLMLPFTIILSIIIAVIISVYVPSSRHTFDAEGH

SEQ ID NO: 356 - DNA, 165 bp, Saccharomyces cerevisiae
atgagttttacaggttcattagcgctggcaggtattggtggtttggtgtacaagtttggcggaggccaatcgtatgaaaaactgccatatgtcaacatccccttcaatcagtacttggataaagtttacaagaagcacttcagcaaagttatgagccgtaccaga

SEQ ID NO: 357 - protein, 55 aa, Saccharomyces cerevisiae
MSFTGSLALAGIGGLVYKFGGGQSYEKLPYVNIPFNQYLDKVYKKHFSKVMSRTR

SEQ ID NO: 358 - DNA, 300 bp, Saccharomyces cerevisiae
atgatcttcctaaacaccttcgcaaggtgccttttaacgtgtttcgtactgtgcagcggtacagcacgttcctctgacacaaacgacactactccggcgtctgcaaagcatttgcagaccacttctttattgacgtgtatggacaattcgcaattaacggcatcattctttgatgtgaaattttaccccgataataatactgttatctttgatattgacgctacgacgacgcttaatgggaacgtcactgtgaaggctgagctgcttacttacggactgaaagtcctggataagactttt

SEQ ID NO: 359 - protein, 100 aa, Saccharomyces cerevisiae
MIFLNTFARCLLTCFVLCSGTARSSDTNDTTPASAKHLQTTSLLTCMDNSQLTASFFDVKFYPDNNTVIFDIDATTTLNGNVTVKAELLTYGLKVLDKTF

SEQ ID NO: 360 - DNA, 300 bp, Saccharomyces cerevisiae
atgtattcaattgttaaagagattattgtagatccttacaaaagactaaaatggggttttattccagtaaagcggcaggtggaagacctgccagatgacttaaattcaacagaaattgtcactatctccaacagtatccagagtcatgaaacagctgaaaatttcatcacgactacaagtgaaaaagatcaactacattttgagactagtagctatagtgaacataaagacaatgtgaacgttactagaagttatgaatatagagatgaagccgataggccatggtggagatttttcgat

SEQ ID NO: 361 - protein, 100 aa, Saccharomyces cerevisiae
MYSIVKEIIVDPYKRLKWGFIPVKRQVEDLPDDLNSTEIVTISNSIQSHETAENFITTTSEKDQLHFETSSYSEHKDNVNVTRSYEYRDEADRPWWRFFD

SEQ ID NO: 362 - DNA, 102 bp, Saccharomyces cerevisiae
atgccgtcaaacgtacgttcgggagtcttaactttgctccatacagcatgtggagcaggcgtacttgcaatgccgtttgcattcaagccatttgggttaatg

SEQ ID NO: 363 - protein, 34 aa, Saccharomyces cerevisiae
MPSNVRSGVLTLLHTACGAGVLAMPFAFKPFGLM

SEQ ID NO: 364 - DNA, 300 bp, Saccharomyces cerevisiae
atgattgtggggttgacactttattttgtattattccgttcaatacagtatttactggtttttttgactccaattaggcagtttgatacatcaacatcacttttattaaacgaattatgttcttctccctctgaaatcaacagttattggaacaagtatttttggaataagctactatcatgggacagtgttttttttatcaagaacataacttccaaaaacggaaaacctcaatttgagcatgaatacgcgttttctcagttgtggacttttttcgttaggctgtttattaaaagtaat

SEQ ID NO: 365 - protein, 100 aa, Saccharomyces cerevisiae
MIVGLTLYFVLFRSIQYLLVFLTPIRQFDTSTSLLLNELCSSPSEINSYWNKYFWNKLLSWDSVFFIKNITSKNGKPQFEHEYAFSQLWTFFVRLFIKSN

SEQ ID NO: 366 - DNA, 300 bp, Saccharomyces cerevisiae
atggtatacacttcaacgtacagacacactatcgttgttgaccttttagaatatttgggtatagtgtccaacttagaaactttacagagtgcccgtgaagatgaaacaagaaaacccgagaataccgataaaaaagaatgtaaacccgactatgatatagaatgcggtcctaatagatcgtgctctgaatcctctaccgattcagactctagtggttcacagatcgaaaaaaatgatcctttcagggtggattggaacggccccagtgatcctgagaacccacaaaactggcccctactg

SEQ ID NO: 367 - protein, 100 aa, Saccharomyces cerevisiae
MVYTSTYRHTIVVDLLEYLGIVSNLETLQSAREDETRKPENTDKKECKPDYDIECGPNRSCSESSTDSDSSGSQIEKNDPFRVDWNGPSDPENPQNWPLL

SEQ ID NO: 368 - DNA, 300 bp, Saccharomyces cerevisiae
atggtcgcaatctcaatgatttggttttttaccaagcgtatgcccagaatatttgcattagcttttaatttaatttcaatatttcttttgatttttcttctcatcggctgttacaacccgtcaaatcagtcaacatttctagtgaagtataaatttgatgacaactcacctttttatacgatcatagagaaatcatatgaaaaatcaaatacaactctgggcttggaggaagtcattataagatccggttacatgggtgtttgtattgataacattccctcccaatatagctcttacaat

SEQ ID NO: 369 - protein, 100 aa, Saccharomyces cerevisiae
MVAISMIWFFTKRMPRIFALAFNLISIFLLIFLLIGCYNPSNQSTFLVKYKFDDNSPFYTIIEKSYEKSNTTLGLEEVIIRSGYMGVCIDNIPSQYSSYN

SEQ ID NO: 370 - DNA, 171 bp, Saccharomyces cerevisiae
atgctgcatcaaaaaatagctcataaagttcgaaaagtcgtcgtcccaggtatttccttattgattttcttccagggatgccttattcttttgtttctccaactcacctataagactctttactgtagaaatgatataaggaaacaaattggtctcaataaaaccaaaaga

SEQ ID NO: 371 - protein, 57 aa, Saccharomyces cerevisiae
MLHQKIAHKVRKVVVPGISLLIFFQGCLILLFLQLTYKTLYCRNDIRKQIGLNKTKR

SEQ ID NO: 372 - DNA, 300 bp, Saccharomyces cerevisiae
atgcaagcccaaggttcacaatcgaatgtagggtctttgaggagtaattgctctgacaattcactaccgaacaatcatgttatgatgcactgcgatgaaagcagcggcacgccgcacagcgagcacaacgattatagttacgaaaagaccaatctggaaagtacggcatcaaatagtcgtgaacacagagacaaccagctaagtaggttgaagagtgaggaatacgttgttccaaagaatcaacgtaggggactattgcctcaactcgccattataccggagttcaaggatgccagagat

SEQ ID NO: 373 - protein, 100 aa, Saccharomyces cerevisiae
MQAQGSQSNVGSLRSNCSDNSLPNNHVMMHCDESSGTPHSEHNDYSYEKTNLESTASNSREHRDNQLSRLKSEEYVVPKNQRRGLLPQLAIIPEFKDARD

SEQ ID NO: 374 - DNA, 102 bp, Saccharomyces cerevisiae
atgtctgattatgttgaactattgaaaagaggtggtaacgaagccatcaaaattaatccaccaaccggtgctgatttccacattacatctcgtggttcagac

SEQ ID NO: 375 - protein, 34 aa, Saccharomyces cerevisiae
MSDYVELLKRGGNEAIKINPPTGADFHITSRGSD

SEQ ID NO: 376 - DNA, 276 bp, Saccharomyces cerevisiae
atgacaaaggaacgtatgaccatcgactacgaaaatgacggtgattttgagtacgataagaataaatacaagacaataaccactcgaataaagagtatcgaacctagtgagggatggttggaaccttctgggtcagtgggtcacataaacacgatacccgaagcgggcgatgttcacgtggatgaacatgaggatagagggtcttctattgatgatgactcaaggacttacctgctatatttcacagaaactcgacgtaaactagaaaacaggcac

SEQ ID NO: 377 - protein, 92 aa, Saccharomyces cerevisiae
MTKERMTIDYENDGDFEYDKNKYKTITTRIKSIEPSEGWLEPSGSVGHINTIPEAGDVHVDEHEDRGSSIDDDSRTYLLYFTETRRKLENRH

SEQ ID NO: 378 - DNA, 300 bp, Saccharomyces cerevisiae
atgggaagcgaaccgtttcagaaaaagaatttgggtctgcaaattaattcgcaagaaagtggaacaacccgctcaacatttcattcgctagaagatctaggagatgatgtaattaatgaaagctgggatcaggtgaaccaaaagagagccaatatagatcatgatgtctttcatgagcaccctgactcttccccatcattgtcagcacagaaagcaaaaacaaaagaagaggaagttgctgtaaagtcatcgaactcccagtcaagagacccttctcctgatactcaagcacatattcca

SEQ ID NO: 379 - protein, 100 aa, Saccharomyces cerevisiae
MGSEPFQKKNLGLQINSQESGTTRSTFHSLEDLGDDVINESWDQVNQKRANIDHDVFHEHPDSSPSLSAQKAKTKEEEVAVKSSNSQSRDPSPDTQAHIP

SEQ ID NO: 380 - DNA, 204 bp, Saccharomyces cerevisiae
atgggaatatttcgttggaactatccagagagttctgtccccggcgtttggggagaaacaacttccactattgactggtgtgaggagaactatgtcgtttctccctatattgccgagtggtcaaacactttaactaacagcgtattcatactgtcagcgatttacacaacttactctgcttacaagaataaattagaaaaaagg

SEQ ID NO: 381 - protein, 68 aa, Saccharomyces cerevisiae
MGIFRWNYPESSVPGVWGETTSTIDWCEENYVVSPYIAEWSNTLTNSVFILSAIYTTYSAYKNKLEKR

SEQ ID NO: 382 - DNA, 255 bp, Saccharomyces cerevisiae
atggctgaaactgaaagactaatgcctaacggtggttcccgcgaaacaaaaccgttaattacgggccatttaatcttgggcacgatagttgcttgtttggggtcgatccagtacggataccacatcgcagagttgaatgcgcctcaagaattcttatcgtgctccagatttgaggcaccagacgaaaacatctcatacgatgacacttgggttgggcaacacggactcaagcaatgcattgcgttaaccgattct

SEQ ID NO: 383 - protein, 85 aa, Saccharomyces cerevisiae
MAETERLMPNGGSRETKPLITGHLILGTIVACLGSIQYGYHIAELNAPQEFLSCSRFEAPDENISYDDTWVGQHGLKQCIALTDS

SEQ ID NO: 384 - DNA, 105 bp, Saccharomyces cerevisiae
atgagtatttcaaattggatcaccactgcgtatttaattacatcaacatcttttcaacctctttatgggtcattttctgatgcacttggtcgaagaaactgcctt

SEQ ID NO: 385 - protein, 35 aa, Saccharomyces cerevisiae
MSISNWITTAYLITSTSFQPLYGSFSDALGRRNCL

SEQ ID NO: 386 - DNA, 300 bp, Saccharomyces cerevisiae
atgaagccggaaaaactcttctccggtttaggtaccagcgatggcgagtatggagtggtaaatagcgagaacatatcaatagatgctatgcaagataatagaggcgagtgtcatcgtagatccatagaaatgcatgctaatgacaatctgggattggtctcccagcgagactgtaccaatcggcccaaaattactcctcaggaatgtttgagtgagactgagcagatatgccatcatggcgagaataggactaaggctgggttagatgtagacgatgctgaaaccggtggtgatcacacc

SEQ ID NO: 387 - protein, 100 aa, Saccharomyces cerevisiae
MKPEKLFSGLGTSDGEYGVVNSENISIDAMQDNRGECHRRSIEMHANDNLGLVSQRDCTNRPKITPQECLSETEQICHHGENRTKAGLDVDDAETGGDHT

SEQ ID NO: 388 - DNA, 282 bp, Saccharomyces cerevisiae
atgagctatggaactataaatgatatgaatgaatcggtaacgaactatcgaataaaaaaagcccaaaacaatatcaagggatggtacgcttactcattttctagcgaaccatttgtcgtttctgcggtttcaacgtatattcccttactactgcagcaatttgcgagtataaatggtgtaaaagttcacgatcactccataccctgcctgtcagaaacgggtagtgattcagataagtgtgttcttggtttgttcaacaatcggatcttcgtagatacttca

SEQ ID NO: 389 - protein, 94 aa, Saccharomyces cerevisiae
MSYGTINDMNESVTNYRIKKAQNNIKGWYAYSFSSEPFVVSAVSTYIPLLLQQFASINGVKVHDHSIPCLSETGSDSDKCVLGLFNNRIFVDTS

SEQ ID NO: 390 - DNA, 105 bp, Saccharomyces cerevisiae
atgaatatgctcattgtcggtagagttgttgctagtgttgggggaagcggacttcaaacgctttgctttgttattggttgtacgatggttggtgaaaggtcacgt

SEQ ID NO: 391 - protein, 35 aa, Saccharomyces cerevisiae
MNMLIVGRVVASVGGSGLQTLCFVIGCTMVGERSR

SEQ ID NO: 392 - DNA, 258 bp, Saccharomyces cerevisiae
atgtctgacaaggaacaaacgagcggaaacacagatttggagaatgcaccagcaggatactatagttcccatgataacgacgttaatggcgttgcagaagatgaacgtccatctcatgattcgttgggcaagatttacactggaggtgataacaatgaatatatctatattgggcgtcaaaagtttttgaagagcgacttataccaagcctttggtggtaccttgaatccagggttagctcctgctccagtgcacaaa

SEQ ID NO: 393 - protein, 86 aa, Saccharomyces cerevisiae
MSDKEQTSGNTDLENAPAGYYSSHDNDVNGVAEDERPSHDSLGKIYTGGDNNEYIYIGRQKFLKSDLYQAFGGTLNPGLAPAPVHK

SEQ ID NO: 394 - DNA, 192 bp, Saccharomyces cerevisiae
atgctgatcatcaatgggaagatcatccctatagctcatactatttgtgcattctccgccttctttgcagctttggtcactggttattcattacattttcataaaattgtaaccaatgcacattatacgtatccagatgagtggtttcctagtgtatcagccactatcggggaccgctatccggaacgttct

SEQ ID NO: 395 - protein, 64 aa, Saccharomyces cerevisiae
MLIINGKIIPIAHTICAFSAFFAALVTGYSLHFHKIVTNAHYTYPDEWFPSVSATIGDRYPERS

SEQ ID NO: 396 - DNA, 174 bp, Saccharomyces cerevisiae
atggcgcgtcaaaagcttactttcaaagaacaaatggatggtttcccctgggtccaacttgttgttgtgtccttagttaggttcagcgaaccaattgcgttttcgtcactatttccttatgtttatttcatggttagagattttaatattgctcccaatgatgctcaagtgtcc

SEQ ID NO: 397 - protein, 58 aa, Saccharomyces cerevisiae
MARQKLTFKEQMDGFPWVQLVVVSLVRFSEPIAFSSLFPYVYFMVRDFNIAPNDAQVS

SEQ ID NO: 398 - DNA, 300 bp, Saccharomyces cerevisiae
atgagattctcacactttctcaaatacaacgctgtccctgaatggcagaatcattacctagattataacgaattgaaaaatttgatctacacattacagacagatgaattgaaacaagaaacgccaaccggtgacttaaacgatgacgctgactctcagactccaggtccaatcgctgatatagaaagcaacatagctgcaggagaaccatcttcatcgaaaagaagatttacacataaactcaagcgtaagctctttggttctaaaacaccttcaggaagcaaaaggggagactccgac

SEQ ID NO: 399 - protein, 100 aa, Saccharomyces cerevisiae
MRFSHFLKYNAVPEWQNHYLDYNELKNLIYTLQTDELKQETPTGDLNDDADSQTPGPIADIESNIAAGEPSSSKRRFTHKLKRKLFGSKTPSGSKRGDSD

SEQ ID NO: 400 - DNA, 300 bp, Saccharomyces cerevisiae
atgacggagactaaggatttgttgcaagacgaagagtttcttaagatccgcagactcaattccgcagaagccaacaaacggcattcggtcacgtacgataacgtgatcctgccacaggagtccatggaggtttcgccacggtcgtctaccacgtcgctggtggagccagtggagtcgactgaaggagtggagtcgactgaggcggaacgtgtggcagggaagcaggagcaggaggaggagtaccctgtggacgcccacatgcaaaagtacctttcacacctgaagagcaagtctcggtcg

SEQ ID NO: 401 - protein, 100 aa, Saccharomyces cerevisiae
MTETKDLLQDEEFLKIRRLNSAEANKRHSVTYDNVILPQESMEVSPRSSTTSLVEPVESTEGVESTEAERVAGKQEQEEEYPVDAHMQKYLSHLKSKSRS

SEQ ID NO: 402 - DNA, 300 bp, Saccharomyces cerevisiae
atggtgcgttttgtttcaattttaagtttattcggctgcgcggcgacgcttgtcacggcccatgatgacatggacatggacatggatatggacatggatatggacatgaatatcgatacgacaacgtctcaatccatagatgtctcatccacggcttcaatcgtccccgtgccacatgaaccaaaacatttgcatggccttcctatactgcaatcgccctcgcttacccctgcggagagattgtactgggaaaactacaacaccacaacctactttactacacaggctgggaataggtct

SEQ ID NO: 403 - protein, 100 aa, Saccharomyces cerevisiae
MVRFVSILSLFGCAATLVTAHDDMDMDMDMDMDMDMNIDTTTSQSIDVSSTASIVPVPHEPKHLHGLPILQSPSLTPAERLYWENYNTTTYFTTQAGNRS

SEQ ID NO: 404 - DNA, 228 bp, Saccharomyces cerevisiae
atgtctatatatctacacataaaattccgattattcctttgcatacctgatttgcccctcagaatccacaaccagacttttcaagaaggtcttttttgcccctttatccttcatggttttcaaaattttgtacaacgacttgcccttgtgaagctcgataccgttcgaggtcttttccactttctctgccttcttgatcacaggcttctccactttctttgcaggagt

SEQ ID NO: 405 - protein, 76 aa, Saccharomyces cerevisiae
MSIYLHIKFRLFLCIPDLPLRIHNQTFQEGLFCPFILHGFQNFVQRLALVKLDTVRGLFHFLCLLDHRLLHFLCRS

SEQ ID NO: 406 - DNA, 102 bp, Saccharomyces cerevisiae
atgcctctatcaaaggtggagcactacctttcataccatacgcgcttactcttaccccatgttttgtctcttcagtcatcacatcgtgttgcatacatcttt

SEQ ID NO: 407 - protein, 34 aa, Saccharomyces cerevisiae
MPLSKVEHYLSYHTRLLLPHVLSLQSSHRVAYIF

SEQ ID NO: 408 - DNA, 300 bp, Saccharomyces cerevisiae
atgaataaagagcatttgctgaaggtggatcccatccccgatgtgactattaaacgcggccctttgaggtcttttctcataacaaaaccctgtgataatttgagttcattacgaacagttacttcatctaaggaaaagcttctagttggctgtttgctgatatttactgccatcgtaaggctacacaatatctccctgccaaatagtgttgtttttggtgaaaatgaagttggtacatttgtttctcaatacgtgaacaacatattcttcaccgatgttcatcctcctttagtggcaatg

SEQ ID NO: 409 - protein, 100 aa, Saccharomyces cerevisiae
MNKEHLLKVDPIPDVTIKRGPLRSFLITKPCDNLSSLRTVTSSKEKLLVGCLLIFTAIVRLHNISLPNSVVFGENEVGTFVSQYVNNIFFTDVHPPLVAM

SEQ ID NO: 410 - DNA, 300 bp, Saccharomyces cerevisiae
atgaaacctccgttaaacatgtcacgttcaaataaaccacttactcaggaagctaatagttcggcgcatattgatagggcacatcagctagcacaggattttaacagtaaacaggatgataccgcactaacttcactgccccacaagaaccccgacatattcagatttgagaacaacatcacagctcatagctcgcgtcgtggttctctatatagagacagcgatgctactgtggttttgccgctttctgaacatacccctagattatcaatggatgatccataccgccaattactacaa

SEQ ID NO: 411 - protein, 100 aa, Saccharomyces cerevisiae
MKPPLNMSRSNKPLTQEANSSAHIDRAHQLAQDFNSKQDDTALTSLPHKNPDIFRFENNITAHSSRRGSLYRDSDATVVLPLSEHTPRLSMDDPYRQLLQ

SEQ ID NO: 412 - DNA, 195 bp, Saccharomyces cerevisiae
atgagcgagggaactgtcaaagaaaacaataatgaagaattcaatgcttatcacacattgactacagaagaagccgctgaatttataggcacaagtctgactgaaggtcttactcaagatgagtccctccgcagactgaaagcagtgggagagaacacattgggtgatgataccaaaattgactataaagcaatg

SEQ ID NO: 413 - protein, 65 aa, Saccharomyces cerevisiae
MSEGTVKENNNEEFNAYHTLTTEEAAEFIGTSLTEGLTQDESLRRLKAVGENTLGDDTKIDYKAM

SEQ ID NO: 414 - DNA, 171 bp, Saccharomyces cerevisiae
atgagtactcctgcaaactatacccgtgtgcccctgtgcgaaccagaggagctgccagacgacatacaaaaagaaaatgaatatggtacactagattctccggggcatttgtatcaagtcaagtcacgtcatgggaagccactacctgagcccgttgtcgacacccctcct

SEQ ID NO: 415 - protein, 57 aa, Saccharomyces cerevisiae
MSTPANYTRVPLCEPEELPDDIQKENEYGTLDSPGHLYQVKSRHGKPLPEPVVDTPP

SEQ ID NO: 416 - DNA, 141 bp, Saccharomyces cerevisiae
atgtcatggaatctactatttgtgctgctaataggattcgtagttttgatattactttcgcccgtcttcaagtcaacatggccattttcgactttctatcgtaatgtgtttcagcccttcctagtggatgaccaaaaatat

SEQ ID NO: 417 - protein, 47 aa, Saccharomyces cerevisiae
MSWNLLFVLLIGFVVLILLSPVFKSTWPFSTFYRNVFQPFLVDDQKY

SEQ ID NO: 418 - DNA, 171 bp, Saccharomyces cerevisiae
atgaatctgcaagaactattagcgaaagtaccgctgttgttatcgtatccgaccattattctatccagtaatctgatcgtaccttcccataatgatctcatatcacgagcagcctctacatcagcagcagagtatgctgacgaaaagctaatatttttcagtacagatcat

SEQ ID NO: 419 - protein, 57 aa, Saccharomyces cerevisiae
MNLQELLAKVPLLLSYPTIILSSNLIVPSHNDLISRAASTSAAEYADEKLIFFSTDH

SEQ ID NO: 420 - DNA, 300 bp, Saccharomyces cerevisiae
atggtgaacgaattagagaatgtgccacgggcgtcgaccttgacgaatgaagagcaaacggttgatcctagcaataacgactcacaggaagatattagtctgggtgattctaacgaaattacttcgttggcatcattaaaggctatccgatcaggaaatgaagaggaaagcgggaacgagcaggtgaatcataatgatgaggccgaagaagatcctctgttaactcgctaccataccgcttgccaaagaggtgatctagcgactgtcaaagaaatgatacatggaaagttgctcgaagtt

SEQ ID NO: 421 - protein, 100 aa, Saccharomyces cerevisiae
MVNELENVPRASTLTNEEQTVDPSNNDSQEDISLGDSNEITSLASLKAIRSGNEEESGNEQVNHNDEAEEDPLLTRYHTACQRGDLATVKEMIHGKLLEV

SEQ ID NO: 422 - DNA, 297 bp, Saccharomyces cerevisiae
atgtcatcagatatcagagacgtagaggaacgaaattcgcggagctcgagctcaagctcgagctcgaactctgccgcccaatccattggacagcatccataccgcggtttcgacagcgaagccgcggaaagggtgcatgagttggctagaacactcacatcgcagagtttactatacactgctaactcaaacaatagctcttccagcaaccataatgcgcacaatgcggactcgagatccgtattttctacggacatggaaggtgtgaacccggtgttcactaacccggacaccccg

SEQ ID NO: 423 - protein, 99 aa, Saccharomyces cerevisiae
MSSDIRDVEERNSRSSSSSSSSNSAAQSIGQHPYRGFDSEAAERVHELARTLTSQSLLYTANSNNSSSSNHNAHNADSRSVFSTDMEGVNPVFTNPDTP

SEQ ID NO: 424 - DNA, 300 bp, Saccharomyces cerevisiae
atgacgcttggtaatagacgccatgggcggaataatgagggaagctctaatatgaatatgaatcgtaacgaccttgacgatgtttcccattacgagatgaaggaaatacaaccaaaggaaaaacaaattggctctatagaaccggaaaatgaagtagaatattttgaaaaaacagtggaaaaaaccattgaaaatatggaatatgaaggtgaacatcatgcatcttacttacggaggttcattgactcgtttagaagagcggaaggctcgcatgcaaattccccagactcgagcaactct

SEQ ID NO: 425 - protein, 100 aa, Saccharomyces cerevisiae
MTLGNRRHGRNNEGSSNMNMNRNDLDDVSHYEMKEIQPKEKQIGSIEPENEVEYFEKTVEKTIENMEYEGEHHASYLRRFIDSFRRAEGSHANSPDSSNS

SEQ ID NO: 426 - DNA, 102 bp, Saccharomyces cerevisiae
atgtggaactcactaaaagcattcgctctagtgttcggaggttgttgctccaatgttattacatttgaaaccttaatgagcaacgaaacaggcagcattaat

SEQ ID NO: 427 - protein, 34 aa, Saccharomyces cerevisiae
MWNSLKAFALVFGGCCSNVITFETLMSNETGSIN

SEQ ID NO: 428 - DNA, 171 bp, Saccharomyces cerevisiae
atgacaaagaaatcatttgtgagcagtcctattgttagggactcgacattgctggtaccaaagtcattaatagcaaagccgtacgtattaccgtttttcccgttatacgctacctttgcccaactatatttccagcaatatgatcgttacatcaaaggacctgagtggact

SEQ ID NO: 429 - protein, 57 aa, Saccharomyces cerevisiae
MTKKSFVSSPIVRDSTLLVPKSLIAKPYVLPFFPLYATFAQLYFQQYDRYIKGPEWT

SEQ ID NO: 430 - DNA, 249 bp, Saccharomyces cerevisiae
atgcctcaaacgcacgaaatgtccctgaacggcactcaatacttaaaatatgaacttaaagaccttgagtctcgagctcacgatgcaaagactccttcaacaaatgaattctatgatgatgtagaatcgcacggaacagaagaattagttgaagctaaactgtcgtttttgaacagaattgctgctggtttaagtgccgagacaaagggtattgaaccgattacagaagatgaaaaaactgatgattct

SEQ ID NO: 431 - protein, 83 aa, Saccharomyces cerevisiae
MPQTHEMSLNGTQYLKYELKDLESRAHDAKTPSTNEFYDDVESHGTEELVEAKLSFLNRIAAGLSAETKGIEPITEDEKTDDS

SEQ ID NO: 432 - DNA, 258 bp, Saccharomyces cerevisiae
atgccagaaaagttagccatgtcaatggtcgatataaaagatgcggggagtgaactaagggacctcgaatctggagctctggacacaaaatcttccgccgctgatgtatactatgagggtgtagaattgcatagaaccaacgaattcattgataataagccgtcctttttcaataggattgcagctgctttaaatgctgagacgaaaggtattgaaccagttacagaagatgaaaaaaatgatgactcgatactcaat

SEQ ID NO: 433 - protein, 86 aa, Saccharomyces cerevisiae
MPEKLAMSMVDIKDAGSELRDLESGALDTKSSAADVYYEGVELHRTNEFIDNKPSFFNRIAAALNAETKGIEPVTEDEKNDDSILN

SEQ ID NO: 434 - DNA, 258 bp, Saccharomyces cerevisiae
atgcaacacaaggatacggcagtagcgaaggacacagctaaaaaacgtttactgagaagaaatagtgcgccgtcagctatacatataatttcacgattagacaaaaagtggtccttcctatggaatactatagatagacacaatattgttgaagagcaagatgaaagtagcgctgcaaaaagcgaagaagaacatgaggatgattatgaattggaacaattactcaacatgataagaataccaatgttcctggaaaag

SEQ ID NO: 435 - protein, 86 aa, Saccharomyces cerevisiae
MQHKDTAVAKDTAKKRLLRRNSAPSAIHIISRLDKKWSFLWNTIDRHNIVEEQDESSAAKSEEEHEDDYELEQLLNMIRIPMFLEK

SEQ ID NO: 436 - DNA, 177 bp, Saccharomyces cerevisiae
atgctaatactgttacgtttatctgaggtttgtgtgaattttgtgataattatcgggattccattgttgatagaggcttcaatactatgtatacagaacatactagaacttctcctcaagggtatagggatcctcaaatttaatcggtatttgcatacaataatattacgattattt

SEQ ID NO: 437 - protein, 59 aa, Saccharomyces cerevisiae
MLILLRLSEVCVNFVIIIGIPLLIEASILCIQNILELLLKGIGILKFNRYLHTIILRLF

SEQ ID NO: 438 - DNA, 177 bp, Saccharomyces cerevisiae
atggcagtccttaacttgaaacgtgaaactgtcgacattgaagagacagcgaagaaagatatcaaaccttattttgcttcgaatgttgaagcggttgatattgatgaagatcccgatgtttcaagatacgatccccagacaggagtgaaaagggcgctcaaaaataggcatatctca

SEQ ID NO: 439 - protein, 59 aa, Saccharomyces cerevisiae
MAVLNLKRETVDIEETAKKDIKPYFASNVEAVDIDEDPDVSRYDPQTGVKRALKNRHIS

SEQ ID NO: 440 - DNA, 174 bp, Saccharomyces cerevisiae
atgggcgaaggtttgctggatttaagatctcagcttggattttacaagttttaccaccacaatcctaagaacgttttgatccattccatatttgtccccacaatcctatttagtggtagctgtatgctccacagagtcaaaatatatcagagtatttcattgactgctgtgcta

SEQ ID NO: 441 - protein, 58 aa, Saccharomyces cerevisiae
MGEGLLDLRSQLGFYKFYHHNPKNVLIHSIFVPTILFSGSCMLHRVKIYQSISLTAVL

SEQ ID NO: 442 - DNA, 117 bp, Saccharomyces cerevisiae
atggcaaaggataatagtgagaagctgcaggtgcagggagaggagaaaaagtccaagcaaccggttaatttcctgcctcagggtaaatggctgaagccaaatgaaatcgaatatgag

SEQ ID NO: 443 - protein, 39 aa, Saccharomyces cerevisiae
MAKDNSEKLQVQGEEKKSKQPVNFLPQGKWLKPNEIEYE

SEQ ID NO: 444 - DNA, 129 bp, Saccharomyces cerevisiae
atgtcgctgatcagcatcctgtctcccctaattacttccgagggcttagattcaagaatcaaaccttcaccaaaaaaggatgcctctactaccactaagccatcactatggaaaactactgagttcaaa

SEQ ID NO: 445 - protein, 43 aa, Saccharomyces cerevisiae
MSLISILSPLITSEGLDSRIKPSPKKDASTTTKPSLWKTTEFK

SEQ ID NO: 446 - DNA, 291 bp, Saccharomyces cerevisiae
atgccgtccaataatagcagttttttagatattgacgatgatctcgagggtgtagatgattttggcaacgagcccaacccatttgatgatgccaccgtacctgatagcccaaacatgaataactcgactgctggaaagggtagcgaattttataacacaacgggcagtaaggcagaatccgcaccattacagggtcaaatggacccaccagcgtacgaccaagtgataggacagaatgacaacgacggtcttgggcgtaatggattgaggccaggattgataaactactat

SEQ ID NO: 447 - protein, 97 aa, Saccharomyces cerevisiae
MPSNNSSFLDIDDDLEGVDDFGNEPNPFDDATVPDSPNMNNSTAGKGSEFYNTTGSKAESAPLQGQMDPPAYDQVIGQNDNDGLGRNGLRPGLINYY

SEQ ID NO: 448 - DNA, 264 bp, Saccharomyces cerevisiae
atgtcatacggaagagaagacactacgattgagcccgacttcatagaaccagatgcacctttggctgcttccgggggtgttgctgacaacataggcggaactatgcagaattcaggcagcagagggacgctcgacgagactgtgctgcaaacactaaagcgagatgtggtggagattaattccagactgaaacaagtggtatacccgcatttcccctcattctttagcccctctgatgacgggataggggcggctgataacgac

SEQ ID NO: 449 - protein, 88 aa, Saccharomyces cerevisiae
MSYGREDTTIEPDFIEPDAPLAASGGVADNIGGTMQNSGSRGTLDETVLQTLKRDVVEINSRLKQVVYPHFPSFFSPSDDGIGAADND

SEQ ID NO: 450 - DNA, 138 bp, Saccharomyces cerevisiae
atgagcaacgttactacgccgtggtggaaacaatgggacccttctgaagttacacttgccgataaaacccctgatgatgtgtggaagacctgtgttttgcaaggtgtttactttggtggaaacgagtacaatggtaac

SEQ ID NO: 451 - protein, 46 aa, Saccharomyces cerevisiae
MSNVTTPWWKQWDPSEVTLADKTPDDVWKTCVLQGVYFGGNEYNGN

SEQ ID NO: 452 - DNA, 300 bp, Saccharomyces cerevisiae
atgactaaatcggttggtgatgaagagtcacagtacattgaggaccctagttttgcagcagcagctgcatttactggcggcagggacggggtttcgtacagtaatcagcgatttgctgagggttccggccattcttctgacttagcaaagtcattagaagactatcggcctcctgatgaaaagccgtcctcattgtcatctgtgggggaaggtggcgctaatgaggaagagaagggcggtaacgacggcggtcccttggcaagaattcaaacagggcttttttctccaagactgcgaaat

SEQ ID NO: 453 - protein, 100 aa, Saccharomyces cerevisiae
MTKSVGDEESQYIEDPSFAAAAAFTGGRDGVSYSNQRFAEGSGHSSDLAKSLEDYRPPDEKPSSLSSVGEGGANEEEKGGNDGGPLARIQTGLFSPRLRN

SEQ ID NO: 454 - DNA, 294 bp, Saccharomyces cerevisiae
atggcaaaagacggcttcgagttatatagatacactccggaattaggtgcgagtatactttttacggtactttttgcagtatcaggggtagcatttgtaattttactattccattattctgtgaaaagtaaaaggagagttggctctcttatgaagtcccaacccgtattgcggtattacggtacggtaaacttagcaggagcgtacattccctttatatttgggtgttttgttgagtgtgtgggctttgcgtttagatgtaaatcaagcaaagacaccacactactaaacccc

SEQ ID NO: 455 - protein, 98 aa, Saccharomyces cerevisiae
MAKDGFELYRYTPELGASILFTVLFAVSGVAFVILLFHYSVKSKRRVGSLMKSQPVLRYYGTVNLAGAYIPFIFGCFVECVGFAFRCKSSKDTTLLNP

SEQ ID NO: 456 - DNA, 300 bp, Saccharomyces cerevisiae
atgcaggggagaaaaaggacgcttacggaaccatttgagccaaataccaatccatttggggacaatgcagcagtaatgacggaaaatgttgaggataacagcgaaacagatggtaaccgtctagaatcaaaaccacaagctttggtcccaccagctttaaatatcgtgccaccagagagcagcatccacagtactgaagaaaaaaaaggtgacgagtacaatggaaatgataaagatagctccttaatctccaacatatttcgtactcgtgtcggaaggagtagtcatgaaaacttgagc

SEQ ID NO: 457 - protein, 100 aa, Saccharomyces cerevisiae
MQGRKRTLTEPFEPNTNPFGDNAAVMTENVEDNSETDGNRLESKPQALVPPALNIVPPESSIHSTEEKKGDEYNGNDKDSSLISNIFRTRVGRSSHENLS

SEQ ID NO: 458 - DNA, 129 bp, Saccharomyces cerevisiae
atggatgcaaagaaaaatactggtgaagccaataatgatgtattggaagaggaagcagcgattcagttgattgcaccaggtatagcgagaaacttaacacaagaagtcattaccggtatcttctgtaat

SEQ ID NO: 459 - protein, 43 aa, Saccharomyces cerevisiae
MDAKKNTGEANNDVLEEEAAIQLIAPGIARNLTQEVITGIFCN

SEQ ID NO: 460 - DNA, 300 bp, Saccharomyces cerevisiae
atgaaaaatatcatttcattggtaagcaagaagaaggctgcctcaaaaaatgaggataaaaacatttctgagtcttcaagagatattgtaaaccaacaggaggttttcaatactgaagattttgaagaagggaaaaaggatagtgcctttgagctagaccacttagagttcaccaccaattcagcccagttaggagattctgacgaagataacgagaatgtgattaatgagatgaacgctactgatgatgcaaatgaagctaacagcgaggaaaaaagcatgactttgaagcaggcgttg

SEQ ID NO: 461 - protein, 100 aa, Saccharomyces cerevisiae
MKNIISLVSKKKAASKNEDKNISESSRDIVNQQEVFNTEDFEEGKKDSAFELDHLEFTTNSAQLGDSDEDNENVINEMNATDDANEANSEEKSMTLKQAL

SEQ ID NO: 462 - DNA, 246 bp, Saccharomyces cerevisiae
atgacatcagctacggacaaatctatcgataggttagttgttaatgcaaaaacaagaagacgaaactcttccgtgggtaaaattgatttaggtgatacagttcctggctttgcagccatgcctgaaagtgctgcctctaaaaatgaggccaaaaaaaggatgaaagccttgactggtgactctaaaaaggatagtgacctactgtggaaggtttggttttcatatagagaaatgaattaccgtcat

SEQ ID NO: 463 - protein, 82 aa, Saccharomyces cerevisiae
MTSATDKSIDRLVVNAKTRRRNSSVGKIDLGDTVPGFAAMPESAASKNEAKKRMKALTGDSKKDSDLLWKVWFSYREMNYRH

SEQ ID NO: 464 - DNA, 102 bp, Saccharomyces cerevisiae
atgggaacggatccccttattatccgaaataatggttcattttgggaagttgatgattttactcgtttaggaagaactcagctattgagctactatttacca

SEQ ID NO: 465 - protein, 34 aa, Saccharomyces cerevisiae
MGTDPLIIRNNGSFWEVDDFTRLGRTQLLSYYLP

SEQ ID NO: 466 - DNA, 300 bp, Saccharomyces cerevisiae
atggatgttgattctgacgttaatgtctccaggttaagagatgaactgcataaggtggcaaacgaggaaacagataccgccactttcaatgatgatgcgccatccggcgccacctgccgtatttgtcgtggagaagctactgaggacaatcctcttttccatccttgtaaatgcaggggctcaattaaatacatgcatgaatcctgtctgttggaatgggtagcttcaaaaaatatagacatttcaaaaccaggcgcggatgttaaatgtgacatctgtcactatcccattcaattcaaa

SEQ ID NO: 467 - protein, 100 aa, Saccharomyces cerevisiae
MDVDSDVNVSRLRDELHKVANEETDTATFNDDAPSGATCRICRGEATEDNPLFHPCKCRGSIKYMHESCLLEWVASKNIDISKPGADVKCDICHYPIQFK

SEQ ID NO: 468 - DNA, 204 bp, Saccharomyces cerevisiae
atgaccaaacaacaaacttctgtaatgcgtaacgcatctatagccaaggaagaacgtgaaggatctgataataataatgtggacagatccagctcagatgccatcagtgacaacgacgcagaaagatctaattctcattctgaaatagataacgaatcaaattttgatatggtgccttattcaaggttcagccataagcaaaaa

SEQ ID NO: 469 - protein, 68 aa, Saccharomyces cerevisiae
MTKQQTSVMRNASIAKEEREGSDNNNVDRSSSDAISDNDAERSNSHSEIDNESNFDMVPYSRFSHKQK

SEQ ID NO: 470 - DNA, 129 bp, Saccharomyces cerevisiae
atgtgccataattctgttaggagcggaaataaggctggttttttggggatcaagttcggaagtgctcttctctcaattgccacaggtgccattgctatcgcattgctatgcaagttccacgaccacgaa

SEQ ID NO: 471 - protein, 43 aa, Saccharomyces cerevisiae
MCHNSVRSGNKAGFLGIKFGSALLSIATGAIAIALLCKFHDHE

SEQ ID NO: 472 - DNA, 102 bp, Saccharomyces cerevisiae
atggcaaacactgtaggaggaattctgtcgggtgtaaatccgttccactacaactccagttcgccgcttacattatttctctttcaagcatgtctcatacta

SEQ ID NO: 473 - protein, 34 aa, Saccharomyces cerevisiae
MANTVGGILSGVNPFHYNSSSPLTLFLFQACLIL

SEQ ID NO: 474 - DNA, 210 bp, Saccharomyces cerevisiae
atggcggttcaacaaagaaagaagaaagagggtagaaagtccgataaaaatgccccatcggtcccacaagtagatgcatcattagacaaaccacttgatattgatgctcctcctactatttacagtgttaatttgaaaccagaatatggtacagctgcattgaatttgtccgcggatttcatcagacaagaacaggcattggctaataag

SEQ ID NO: 475 - protein, 70 aa, Saccharomyces cerevisiae
MAVQQRKKKEGRKSDKNAPSVPQVDASLDKPLDIDAPPTIYSVNLKPEYGTAALNLSADFIRQEQALANK

SEQ ID NO: 476 - DNA, 300 bp, Saccharomyces cerevisiae
atggcattgtttcgtgccctgtatattatttgggtattcctactcattccactgtccaatgcagaagaattcacccccaaggttaccagaactttgtcaagatatgtattcgatatagtaaactttgatgattcaaacactttgatcagagcagaagaagactctgtcgagataagttttgatgctggagaaaattggaaaacaatagatgagattgaagagcctatcgagtcatttgttgttgatcccttccgtgggcatgatagagcttttgctttcgtgaaaacggcaccaaaattt

SEQ ID NO: 477 - protein, 100 aa, Saccharomyces cerevisiae
MALFRALYIIWVFLLIPLSNAEEFTPKVTRTLSRYVFDIVNFDDSNTLIRAEEDSVEISFDAGENWKTIDEIEEPIESFVVDPFRGHDRAFAFVKTAPKF

SEQ ID NO: 478 - DNA, 132 bp, Saccharomyces cerevisiae
atggcaaaccctttttcgagatggtttctatcagagagacctccaaactgccatgtagccgatttagaaacaagtttagatccccatcaaacgttgttgaaggtgcaaaaatacaaacccgctttaagcgac

SEQ ID NO: 479 - protein, 44 aa, Saccharomyces cerevisiae
MANPFSRWFLSERPPNCHVADLETSLDPHQTLLKVQKYKPALSD

SEQ ID NO: 480 - DNA, 300 bp, Saccharomyces cerevisiae
atggaaatcgatggcaacactctggtgttcataatagtgatccttttcctatttttctcctcaccgggtggtgatggtgtgtcttctcaatatgagttcaatcaactccagagactcaagcagcagttccgaacagagcacaatacgttcgtcaatatgacatatacagatagttttcgaaatattaccgggcttaaactcagctaccaagacatgctgaataatcctctccaaaatgccacttacccactaccaggaaaagattatgatcgatggtttcccaatcaaaactacatggtt

SEQ ID NO: 481 - protein, 100 aa, Saccharomyces cerevisiae
MEIDGNTLVFIIVILFLFFSSPGGDGVSSQYEFNQLQRLKQQFRTEHNTFVNMTYTDSFRNITGLKLSYQDMLNNPLQNATYPLPGKDYDRWFPNQNYMV

SEQ ID NO: 482 - DNA, 285 bp, Saccharomyces cerevisiae
atgagagtatatcagttttgccgacctttccaattattcacctgcttcttatgctaccttctagtgttcgtaaaagctaacaaggaaaagataagtcaaaagaattatcaagtatgcgcaggtatgtattccaaagaagattggaagggcaaaatagacccgtttatatcattcaatcttaaaaaaataagtggattgagtgatgagtctgatccaggcttagtcgttgcaatctatgatttccaagactttgagcacttaggtgtgcaattgccggatgaagaa

SEQ ID NO: 483 - protein, 95 aa, Saccharomyces cerevisiae
MRVYQFCRPFQLFTCFLCYLLVFVKANKEKISQKNYQVCAGMYSKEDWKGKIDPFISFNLKKISGLSDESDPGLVVAIYDFQDFEHLGVQLPDEE

SEQ ID NO: 484 - DNA, 300 bp, Saccharomyces cerevisiae
atgctagtaaataaagtgatagggttactgggtgtactcttcgcaacaagatttacaaatgccgtcgaattggatctagacaactacgaatctttgcaaaatgctacttcactaattgcctacggtttaatggattattacactggtaatcagtatggtaagacggtcggtatgttttcagatccgtactattggtgggaagccggtggtgcctggggctgtatgctagattactggtttttcatggataacgacacctataatgatgaaattatagcagcaatgatacatcaagctggt

SEQ ID NO: 485 - protein, 100 aa, Saccharomyces cerevisiae
MLVNKVIGLLGVLFATRFTNAVELDLDNYESLQNATSLIAYGLMDYYTGNQYGKTVGMFSDPYYWWEAGGAWGCMLDYWFFMDNDTYNDEIIAAMIHQAG

SEQ ID NO: 486 - DNA, 189 bp, Saccharomyces cerevisiae
atgattcaatttaaaagtccaggtaactggctgttcatagtaccctggattgccttcattccatggtatggtatgctgatagccatgcttatttgctgggccagtcaaggccatcccatatattggttcatgcactcggagcaattccctgtgtacatttcagatataggtgccactaatttaaggcca

SEQ ID NO: 487 - protein, 63 aa, Saccharomyces cerevisiae
MIQFKSPGNWLFIVPWIAFIPWYGMLIAMLICWASQGHPIYWFMHSEQFPVYISDIGATNLRP

SEQ ID NO: 488 - DNA, 156 bp, Saccharomyces cerevisiae
atgcgatggtatatatatagatatatatatatatatatgtatctgtatatatatgttcatacatatatatatatctattattgttgttattattatcgtgattattatttaggtcctcccttctttttacctgtttttaatctaccctcaaatccg

SEQ ID NO: 489 - protein, 52 aa, Saccharomyces cerevisiae
MRWYIYRYIYIYMYLYIYVHTYIYIYYCCYYYRDYYLGPPFFLPVFNLPSNP

SEQ ID NO: 490 - DNA, 231 bp, Saccharomyces cerevisiae
atggacaagtatttgaattcatttgttgaccacctttcagagtggtcatctcgtgcctttaggaacaattcatcaagcgctaaccaaagtgcgtcgaacaaggaattagaacaagtttttgaacagatcaatgctatagttgaaaaccacaataacaaattaaccactgcctttgataagatatcatatcgcgttgctcacaagattacacacttggtggaaagccattct

SEQ ID NO: 491 - protein, 77 aa, Saccharomyces cerevisiae
MDKYLNSFVDHLSEWSSRAFRNNSSSANQSASNKELEQVFEQINAIVENHNNKLTTAFDKISYRVAHKITHLVESHS

SEQ ID NO: 492 - DNA, 180 bp, Saccharomyces cerevisiae
atgccagagtatacgctactggctgataatataagggagaatatcgttcatttcgatccgaatggtttgtttgataacttgcacaccattgttcatgaagatgacagtcaagagaacgaggaggccgagcatttcaattatgatcaggtgttggataaatcgttattgtcaagaggttct

SEQ ID NO: 493 - protein, 60 aa, Saccharomyces cerevisiae
MPEYTLLADNIRENIVHFDPNGLFDNLHTIVHEDDSQENEEAEHFNYDQVLDKSLLSRGS

SEQ ID NO: 494 - DNA, 300 bp, Saccharomyces cerevisiae
atgaggatcgaaaagcaccgtacccccctgtcgaagggaattatttggacgatattgtctgtgtgccttttattcatgttcaccacactgatattggttattgtagccactgctggctccaccgccaactacaaacccttaacgaatatatacatcggtgaagccgatatcaaacacatcaatgtaagcaaggtgatcccgcagataggccctattttgacaatattagggtccgctttgacggctccgaacagctccttggatgatatttttggcgccatgaaaaatattgctgatact

SEQ ID NO: 495 - protein, 100 aa, Saccharomyces cerevisiae
MRIEKHRTPLSKGIIWTILSVCLLFMFTTLILVIVATAGSTANYKPLTNIYIGEADIKHINVSKVIPQIGPILTILGSALTAPNSSLDDIFGAMKNIADT

SEQ ID NO: 496 - DNA, 300 bp, Saccharomyces cerevisiae
atgtcgtcgtcaattacagatgagaaaatatctggtgaacagcaacaacctgctggcagaaaactatactataacacaagtacatttgcagagcctcctctagtggacggagaaggtaaccctataaattatgagccggaagtttacaacccggatcacgaaaagctataccataacccatcactgcctgcacaatcaattcaggatacaagagatgatgaattgctggaaagagtttatagccaggatcaaggtgtagagtatgaggaagatgaagaggataagccaaacctaagcgct

SEQ ID NO: 497 - protein, 100 aa, Saccharomyces cerevisiae
MSSSITDEKISGEQQQPAGRKLYYNTSTFAEPPLVDGEGNPINYEPEVYNPDHEKLYHNPSLPAQSIQDTRDDELLERVYSQDQGVEYEEDEEDKPNLSA

SEQ ID NO: 498 - DNA, 249 bp, Saccharomyces cerevisiae
atgtccgaagaacggcatgaagatcatcatagggatgttgaaaataaattgaatttaaatggtaaagacgatattaacgggaatacctcaatctcgatcgaggtgcctgatggaggatatgggtggtttattcttcttgcttttattctgtacaacttttctacttggggggcaaattctggttatgctatttatttagcgcattatttagagaataatacttttgctggtgggagtaaattagactat

SEQ ID NO: 499 - protein, 83 aa, Saccharomyces cerevisiae
MSEERHEDHHRDVENKLNLNGKDDINGNTSISIEVPDGGYGWFILLAFILYNFSTWGANSGYAIYLAHYLENNTFAGGSKLDY

SEQ ID NO: 500 - DNA, 102 bp, Saccharomyces cerevisiae
atgacttcgtttcaagcggtctctttcgctctcggttgtaacacacttgtagcctgctatgctttcaccgtactcgaaaagcgtagcctcatgactagttgt

SEQ ID NO: 501 - protein, 34 aa, Saccharomyces cerevisiae
MTSFQAVSFALGCNTLVACYAFTVLEKRSLMTSC

SEQ ID NO: 502 - DNA, 132 bp, Saccharomyces cerevisiae
atggaaaacaaactactttgttggtggttgtactggccatgcgtgtattcatctattatagctaccataatatctttttacaccataactagacacttattaaattaccgtaaaccatatgaacaaagacta

SEQ ID NO: 503 - protein, 44 aa, Saccharomyces cerevisiae
MENKLLCWWLYWPCVYSSIIATIISFYTITRHLLNYRKPYEQRL

SEQ ID NO: 504 - DNA, 252 bp, Saccharomyces cerevisiae
atgaccattattcagacggttactgaattgggtgttaccgaggacaccattaaggttcagatggctccttccggcggcaaacacctattggcagatcccggtaatcatccagcggagcattttgagagccagatgtcgtggctaaggtttcaaacaaggcagtatctaactagattcacagacaaccaatcagatttcgtacattctttacaaaaaaagcacagaacgccttttagagacgtttatttcaaa

SEQ ID NO: 505 - protein, 84 aa, Saccharomyces cerevisiae
MTIIQTVTELGVTEDTIKVQMAPSGGKHLLADPGNHPAEHFESQMSWLRFQTRQYLTRFTDNQSDFVHSLQKKHRTPFRDVYFK

SEQ ID NO: 506 - DNA, 117 bp, Saccharomyces cerevisiae
atgtctgctcccgctgccgatcataacgctgccaaacctattcctcatgtacctcaagcgtcccgacggtacaaaaattcatacaatggattcgtatacaatatacatacatggctg

SEQ ID NO: 507 - protein, 39 aa, Saccharomyces cerevisiae
MSAPAADHNAAKPIPHVPQASRRYKNSYNGFVYNIHTWL

SEQ ID NO: 508 - DNA, 273 bp, Saccharomyces cerevisiae
atgagtcagtcttacgaagcaggaaatgccaatatgggccaaggggaggatgatgaatttgatggctatttcgaagactttgacaacgatatcatgccaaatagtaataatggacaaagggttggtactaatgctggattgtcattcaatgacgaagtaaatgttaatgatgatgattttttagacatttataatatgtcccctagagagagattgatgcataatatcaggaagaatgttcaaaaattacagttttatttttattcactacgc

SEQ ID NO: 509 - protein, 91 aa, Saccharomyces cerevisiae
MSQSYEAGNANMGQGEDDEFDGYFEDFDNDIMPNSNNGQRVGTNAGLSFNDEVNVNDDDFLDIYNMSPRERLMHNIRKNVQKLQFYFYSLR

SEQ ID NO: 510 - DNA, 102 bp, Saccharomyces cerevisiae
atgataaaaaatggtacatgcccctattgggaacgtgatgatctttcggaatgtgctaggcgagaatatatcgagtttaaatttcctctatttatattgttg

SEQ ID NO: 511 - protein, 34 aa, Saccharomyces cerevisiae
MIKNGTCPYWERDDLSECARREYIEFKFPLFILL

SEQ ID NO: 512 - DNA, 105 bp, Saccharomyces cerevisiae
atggaggaaactaagtactcttcgcagcaggagatagaaggagcatgtggttcagacgcttcattgaatgctagaggtagcaatgattctccaatgggactttcc

SEQ ID NO: 513 - protein, 35 aa, Saccharomyces cerevisiae
MEETKYSSQQEIEGACGSDASLNARGSNDSPMGLS

SEQ ID NO: 514 - DNA, 165 bp, Saccharomyces cerevisiae
atgagttctagtgttgttggtgcctcaagtaataaaaaaagtggaattaggcagtcctgtgagattattgagcgagaacgtcactcaaacgatgacacgtactctatgacatcgaccttttttaagctcaaagaaaacgaaattatgtctgcacagtttgattcc

SEQ ID NO: 515 - protein, 55 aa, Saccharomyces cerevisiae
MSSSVVGASSNKKSGIRQSCEIIERERHSNDDTYSMTSTFFKLKENEIMSAQFDS

SEQ ID NO: 516 - DNA, 105 bp, Saccharomyces cerevisiae
atgtcttcactagaagtggtagatgggtgcccctatggataccgaccatatccagatagtggcacaaatgcattaaatccatgttttatatcagtaatatccgcc

SEQ ID NO: 517 - protein, 35 aa, Saccharomyces cerevisiae
MSSLEVVDGCPYGYRPYPDSGTNALNPCFISVISA

SEQ ID NO: 518 - DNA, 300 bp, Saccharomyces cerevisiae
atgtcggatcattctcccatttctaataaggaaaatcatctgctgccatcagactcgtcaagaagctcatccagcgatatgcattcgacgggcaccacgggaaccacaggcgtcgaacctgtagatttcaccggtgaaggtgccaaatacacaactgctacggagggcaatggtggtgcagatttagcgattcaaagaacgacgactatgaattctgctgcagaatcagaggttaatatcacgagaagattaactaaaatccttactgggtctgttaacgagcctgaccgtgtagaggtt

SEQ ID NO: 519 - protein, 100 aa, Saccharomyces cerevisiae
MSDHSPISNKENHLLPSDSSRSSSSDMHSTGTTGTTGVEPVDFTGEGAKYTTATEGNGGADLAIQRTTTMNSAAESEVNITRRLTKILTGSVNEPDRVEV

SEQ ID NO: 520 - DNA, 300 bp, Saccharomyces cerevisiae
atgagtaatcctcaaaaagctctaaacgactttctgtccagtgaatctgttcatacacatgatagttctaggaaacaatctaataagcagtcatccgacgaaggacgctcttcatcacaaccttcacatcatcactctggtggtactaacaacaataataacaataataataataataataacagtaacaacaacaacaacggcaacgatgggggaaatgatgacgactatgattatgaaatgcaagattatagaccttctccgcaaagtgcgcggcctactcccacgtatgttccacaa

SEQ ID NO: 521 - protein, 100 aa, Saccharomyces cerevisiae
MSNPQKALNDFLSSESVHTHDSSRKQSNKQSSDEGRSSSQPSHHHSGGTNNNNNNNNNNNNSNNNNNGNDGGNDDDYDYEMQDYRPSPQSARPTPTYVPQ

SEQ ID NO: 522 - DNA, 141 bp, Saccharomyces cerevisiae
atgtctaacgaatctaacgaccttgaaaaaaacatttcgcacttggacccgaccggtgttgacaatgcttatattccacctgaacagccggaaacgaagcattcgcgttttaatattgacagagataccttaagaaaccac

SEQ ID NO: 523 - protein, 47 aa, Saccharomyces cerevisiae
MSNESNDLEKNISHLDPTGVDNAYIPPEQPETKHSRFNIDRDTLRNH

SEQ ID NO: 524 - DNA, 231 bp, Saccharomyces cerevisiae
atggatgaatttgaatctaccaaactttcgaaggttcagttttccactagcgtgttaagtacgccttcgaatgaaggaaataatctaatacacagattcaagaactctttcaagcgaaatgattcaccagcgatccaagaaggtttgctgtattcggagctttcagaggaagaaaaaatacaatgggacttagccaaccagccgtataaaaaggtcctagatcaaagacac

SEQ ID NO: 525 - protein, 77 aa, Saccharomyces cerevisiae
MDEFESTKLSKVQFSTSVLSTPSNEGNNLIHRFKNSFKRNDSPAIQEGLLYSELSEEEKIQWDLANQPYKKVLDQRH

SEQ ID NO: 526 - DNA, 300 bp, Saccharomyces cerevisiae
atgatggactcgtcaagcaaaagcttaactcagtatataccctcacccatgggatctctatcaaggctaaagcagaagggtgtggacaattttcagaaggtgaaaaaatccggtaaatccatctataattacaactactcaaaattcgttcctcatccattttcaactattgatgaaagtgttaaacactctgaaagtgggcggtatgatgatttggagataattcgtccaacaaaagaaaaggaagtaacaagttctgtgtacaaaagaaacagtggcaagtctctgaatacagaatct

SEQ ID NO: 527 - protein, 100 aa, Saccharomyces cerevisiae
MMDSSSKSLTQYIPSPMGSLSRLKQKGVDNFQKVKKSGKSIYNYNYSKFVPHPFSTIDESVKHSESGRYDDLEIIRPTKEKEVTSSVYKRNSGKSLNTES

SEQ ID NO: 528 - DNA, 141 bp, Saccharomyces cerevisiae
atgagtttcggtagtaaagtctccagggctttgagatttttggaaattcctgtcaaagacagggcatctgtgagtttcttgaagaacccggatttgcaacctattaagtcggctaaccaaacatgggggttctggtctaat

SEQ ID NO: 529 - protein, 47 aa, Saccharomyces cerevisiae
MSFGSKVSRALRFLEIPVKDRASVSFLKNPDLQPIKSANQTWGFWSN

SEQ ID NO: 530 - DNA, 207 bp, Saccharomyces cerevisiae
atggattccacagcacttaaggtagctctaggctgtattgcaattcgtttggctgtgaacagcctttttccctctctacaacaacaactggaccagtctgtagaattctcaactcccgtaacttcatttaggtcactacaggaaggtatatacctactgcggaacaacatccaagtatataatcatggggttgttcaccatcctcca

SEQ ID NO: 531 - protein, 69 aa, Saccharomyces cerevisiae
MDSTALKVALGCIAIRLAVNSLFPSLQQQLDQSVEFSTPVTSFRSLQEGIYLLRNNIQVYNHGVVHHPP

SEQ ID NO: 532 - DNA, 108 bp, Saccharomyces cerevisiae
atgaataggactgtctttttggcatttgtatttggatggtatttctgttcaatagctctctccatatacaatagatggatgttcgatccgaaggacggattgggtatt

SEQ ID NO: 533 - protein, 36 aa, Saccharomyces cerevisiae
MNRTVFLAFVFGWYFCSIALSIYNRWMFDPKDGLGI

SEQ ID NO: 534 - DNA, 300 bp, Saccharomyces cerevisiae
atgactggcatcaaagctcaagtccatcccccacctgatagtaccctatttcatgaggaggagaagaagaaagtaggaggcaatttacctcaaaaggtcataaatcaacaagaaaggggttctgatcacgctccatcgggtcaccatcaataccaccaactgattaaccatgacgcaaatgacacaaagacctcaaattcagtttctgatgtgtctaaaggtcagaaaactgctgactccaacccggaaggtaagaaacagtcatcaaaagacatatttgttgcctccagcgctcaaaaa

SEQ ID NO: 535 - protein, 100 aa, Saccharomyces cerevisiae
MTGIKAQVHPPPDSTLFHEEEKKKVGGNLPQKVINQQERGSDHAPSGHHQYHQLINHDANDTKTSNSVSDVSKGQKTADSNPEGKKQSSKDIFVASSAQK

SEQ ID NO: 536 - DNA, 225 bp, Saccharomyces cerevisiae
atgaactcttccacttcttcagaaaatgtgttcataaattcatttagctatttgaatcaaacatcacaagccgtaatctcaggtaactccactttcgcaaatgttatcaactttccttatagacttggattatcctttattggggctgtgaacttgcagtacgagcaaaccgttaaatctgaagaaattcccccaactctaaggtctgtttttgatacaataggg

SEQ ID NO: 537 - protein, 75 aa, Saccharomyces cerevisiae
MNSSTSSENVFINSFSYLNQTSQAVISGNSTFANVINFPYRLGLSFIGAVNLQYEQTVKSEEIPPTLRSVFDTIG

SEQ ID NO: 538 - DNA, 300 bp, Saccharomyces cerevisiae
atgggcagtgcttggacaaactacaattttgaagaggttaagtctcattttgggttcaaaaaatatgttgtatcatctttagtactagtgtatggactaattaaggttctcacgtggatcttccgtcaatgggtgtattccagcttgaatccgttctccaaaaaatcttcattactgaacagagcagttgcctcctgtggtgagaagaatgtgaaagtttttggtttttttcatccgtattgtaatgctggtggtggtggggaaaaagtgctctggaaagctgtagatatcactttgaga

SEQ ID NO: 539 - protein, 100 aa, Saccharomyces cerevisiae
MGSAWTNYNFEEVKSHFGFKKYVVSSLVLVYGLIKVLTWIFRQWVYSSLNPFSKKSSLLNRAVASCGEKNVKVFGFFHPYCNAGGGGEKVLWKAVDITLR

SEQ ID NO: 540 - DNA, 300 bp, Saccharomyces cerevisiae
atgtctccaaactcgtcgaaaactcgaacggaccagataagctccatgcctggtattaatgaagccacgaaggtggaaagtaagaatgttgtgaaggatgctgttccaataaaatctgaagttgaaaccaatggtacatcaatagtaagagaaaaacaagatccatcgtacgttggttggaaacaagttggtggttgggaggaaaaggacgagttaacttccgaagaccttttagtggacgtaaacaaggacacttttttggggaaccttttaccagataaattctatggtgattggtat

SEQ ID NO: 541 - protein, 100 aa, Saccharomyces cerevisiae
MSPNSSKTRTDQISSMPGINEATKVESKNVVKDAVPIKSEVETNGTSIVREKQDPSYVGWKQVGGWEEKDELTSEDLLVDVNKDTFLGNLLPDKFYGDWY

SEQ ID NO: 542 - DNA, 300 bp, Saccharomyces cerevisiae
atggcgaggcctcaaaatcatcgccgcagtaattggacagaaagagacgataatgatgattatctgtttcagcgatttctagaagaatcggaaacgaggcatagtagagagccttcacctgtaaccgagcaatctcagcaagaactacagcaggatgtacagcaagcaatcgatggaatatttaactcccttaggaggaatatgagttctacttcaaatataaatagagcagctaatatggatgcaaccacaaacggaaatggaggaatcaatgcagacactataagagccaccaacgcc

SEQ ID NO: 543 - protein, 100 aa, Saccharomyces cerevisiae
MARPQNHRRSNWTERDDNDDYLFQRFLEESETRHSREPSPVTEQSQQELQQDVQQAIDGIFNSLRRNMSSTSNINRAANMDATTNGNGGINADTIRATNA

SEQ ID NO: 544 - DNA, 174 bp, Saccharomyces cerevisiae
atgaattgcaaggcggtaaccattagtttattactgttgttatttttaacaagagtatatattcagccgacattctcgttaatttcagattgcgatgaaacttttaattattgggaaccattaaatttattggtacgtggatttggtaaacaaacctgggaatattcacccgag

SEQ ID NO: 545 - protein, 58 aa, Saccharomyces cerevisiae
MNCKAVTISLLLLLFLTRVYIQPTFSLISDCDETFNYWEPLNLLVRGFGKQTWEYSPE

SEQ ID NO: 546 - DNA, 213 bp, Saccharomyces cerevisiae
atggtatcagctttgaatcccagaactacagagtttgaatttggtgggctgattggtgccttaggcatcagcatagggctgcctgttttcactatcatcttgaatcaaatgataaggcccgattattttattaagggatttttccagaatttcgatatagttgagctttggaacggtatcaagccattgcgctactatctgggcaatcgtgaa

SEQ ID NO: 547 - protein, 71 aa, Saccharomyces cerevisiae
MVSALNPRTTEFEFGGLIGALGISIGLPVFTIILNQMIRPDYFIKGFFQNFDIVELWNGIKPLRYYLGNRE

SEQ ID NO: 548 - DNA, 300 bp, Saccharomyces cerevisiae
atgcacctagatctcatacacaagtccttcatcttagtgtggctcatatatatacgagccgcgttggctgaccaattcacatataaagcttgctattcagctagtgatatacgaaaattggggttgacttacaagggtgtttacgagtatcaatcagtttcctactgtcaaaatgaatgccctggtcaggctgtcgttgctcttttcaacggtacaggttgctactgtggtggttccgtagctcagttacagtctttgacgcaggtagattcgagcaaatgtgatgtttcgtgtgctggc

SEQ ID NO: 549 - protein, 100 aa, Saccharomyces cerevisiae
MHLDLIHKSFILVWLIYIRAALADQFTYKACYSASDIRKLGLTYKGVYEYQSVSYCQNECPGQAVVALFNGTGCYCGGSVAQLQSLTQVDSSKCDVSCAG

SEQ ID NO: 550 - DNA, 300 bp, Saccharomyces cerevisiae
atgaagttctcgcattccttacaattcaattctgtaccagaatggtctaccaagtatctggcctattcgcagctgaaaaaattgatctattctttgcaaaaagataagctgtacagtaacaataagcaccatgttgtggagccacatgacgccaacgatgaaaatctgccgctattggcagatgcttctccagatgatcaattctacatctctaaatttgttgctgccttaaaccaagaattgaaaaaaattgataaattctacatatctcaagaaacaggtcttatcgccaactacaac

SEQ ID NO: 551 - protein, 100 aa, Saccharomyces cerevisiae
MKFSHSLQFNSVPEWSTKYLAYSQLKKLIYSLQKDKLYSNNKHHVVEPHDANDENLPLLADASPDDQFYISKFVAALNQELKKIDKFYISQETGLIANYN

SEQ ID NO: 552 - DNA, 300 bp, Saccharomyces cerevisiae
atggacaagaagaaggatctactggagaacgaacaatttctccgcatccaaaagctcaacgctgccgatgcgggcaaaagacaatctataacagtggacgacgagggcgaactatatgggttagacacctccggcaactcaccagccaatgaacacacagctaccacaattacacagaatcacagcgtggtggcctcaaacggagacgtcgcattcatcccaggaactgctaccgaaggcaatacagagattgtaactgaagaagtgattgagaccgatgataacatgttcaagacccat

SEQ ID NO: 553 - protein, 100 aa, Saccharomyces cerevisiae
MDKKKDLLENEQFLRIQKLNAADAGKRQSITVDDEGELYGLDTSGNSPANEHTATTITQNHSVVASNGDVAFIPGTATEGNTEIVTEEVIETDDNMFKTH

SEQ ID NO: 554 - DNA, 300 bp, Saccharomyces cerevisiae
atggagacgccgcaaatgaacgctatacaagaggaggacaatttgtctccggaagttgctttccagactcctaaattgaatgattccgatgcttcatcgttttctttgtccaatatgaacgctgtcgggaatgtagacggtataccatcccaaaacaggacattttttgcatcacctaggcccagttccctattttattctgccaaggaaggtaacaattccagttctagtatcatctacaatccttcgttcacttttggtgaaaacgcttctagtaatgctaatatcaatgaagctgct

SEQ ID NO: 555 - protein, 100 aa, Saccharomyces cerevisiae
METPQMNAIQEEDNLSPEVAFQTPKLNDSDASSFSLSNMNAVGNVDGIPSQNRTFFASPRPSSLFYSAKEGNNSSSSIIYNPSFTFGENASSNANINEAA

SEQ ID NO: 556 - DNA, 189 bp, Saccharomyces cerevisiae
atggacaaatataccaacagggatcatccggactatattcctggcacatttaacatctattcttcccaaaatttggaaaatggtattatatacgaatcaaaattgaagaaaacctcctcaggagtcgtcctaatccctcaaccatcatactcgccaaatgatccactgaactggtctagctggaggaaa

SEQ ID NO: 557 - protein, 63 aa, Saccharomyces cerevisiae
MDKYTNRDHPDYIPGTFNIYSSQNLENGIIYESKLKKTSSGVVLIPQPSYSPNDPLNWSSWRK

SEQ ID NO: 558 - DNA, 237 bp, Saccharomyces cerevisiae
atgtcaactttattagaaaggactaagagtgtgcaagagctgaagaagagagctgcagggaaaacatccgcaaatcccgcagaggtcgctaaagctaaaaaagtactaagaaggctatatagttgggatgaaattccggaatggcaaagagacaatgattttattttacatggatacgtgaaagaaactagtagcttcattgaaacttttaaaagtttgttttatttgcataatgaa

SEQ ID NO: 559 - protein, 79 aa, Saccharomyces cerevisiae
MSTLLERTKSVQELKKRAAGKTSANPAEVAKAKKVLRRLYSWDEIPEWQRDNDFILHGYVKETSSFIETFKSLFYLHNE

SEQ ID NO: 560 - DNA, 300 bp, Saccharomyces cerevisiae
atgtcacagcaggagaatggtgatgtggccactgaattaatcgaaaatagactttccttctcaagaatccctagaataagccttcatgtaagggatttgtcaatcgttgcatccaaaacaaatacgacgctagttaatacgttttccatggacctgcccagtgggtcggtcatggcagttatgggtggttcggggtcagggaagactacgttgctgaatgttctggcatccaagatcagtggtgggttaactcataatggttctatacggtacgtattggaagatacaggttcagaaccc

SEQ ID NO: 561 - protein, 100 aa, Saccharomyces cerevisiae
MSQQENGDVATELIENRLSFSRIPRISLHVRDLSIVASKTNTTLVNTFSMDLPSGSVMAVMGGSGSGKTTLLNVLASKISGGLTHNGSIRYVLEDTGSEP

SEQ ID NO: 562 - DNA, 186 bp, Saccharomyces cerevisiae
atggctgacagttcttcgacttcggcgttcatttcaaccctgattatctacggtcttaccgccgtcgtgtttgtctggctctttttgctattgcggcccaagaatagaagagtatacgagccacggtctcttaaggacattcagactattccggaggaagagagaacggaaccagttcctgaaggc

SEQ ID NO: 563 - protein, 62 aa, Saccharomyces cerevisiae
MADSSSTSAFISTLIIYGLTAVVFVWLFLLLRPKNRRVYEPRSLKDIQTIPEEERTEPVPEG

SEQ ID NO: 564 - DNA, 132 bp, Saccharomyces cerevisiae
atgcaacttgtgccgctagaattgaatagatccactctaagtgggatatctgggtccatctccatctcctgctggatcattgtgtttgtccctcaaatttacgagaacttttaccggaagtcgtctgatggg

SEQ ID NO: 565 - protein, 44 aa, Saccharomyces cerevisiae
MQLVPLELNRSTLSGISGSISISCWIIVFVPQIYENFYRKSSDG

SEQ ID NO: 566 - DNA, 147 bp, Saccharomyces cerevisiae
atgctggaaactgatcactctaggaatgacaatttagacgataaaagcactgtctgctacagcgaaaagacagatagcaatgttgagaagtctaccacgtctggcttgcgccgtatagacgctgtcaacaaggtcttgtctgactac

SEQ ID NO: 567 - protein, 49 aa, Saccharomyces cerevisiae
MLETDHSRNDNLDDKSTVCYSEKTDSNVEKSTTSGLRRIDAVNKVLSDY

SEQ ID NO: 568 - DNA, 117 bp, Saccharomyces cerevisiae
atggccattggcaaaaggttactggtgaacaaaccagcagaagaatcattttatgcttctccaatgtatgattttttgtatccgtttaggccagtggggaaccaatggctgccagaa

SEQ ID NO: 569 - protein, 39 aa, Saccharomyces cerevisiae
MAIGKRLLVNKPAEESFYASPMYDFLYPFRPVGNQWLPE

SEQ ID NO: 570 - DNA, 300 bp, Saccharomyces cerevisiae
atgtcaatttcaaagtacttcactcccgttgctgacgggtcactcactttcaatggcgcgaacattcaatttggcgccgatgctcaaggcgagtcaaaaaagagttatgacgctgaggacagcatgccgaatccggcaaatcaactaaatgacataaccttccaagcagaggctggtgaaatggttttggttttgggttatcccacatccactctatttaagactttgtttcatggtaaaactagtttgtcatactctcctccaggctcgattaaatttaaaaataatgagtttaagagc

SEQ ID NO: 571 - protein, 100 aa, Saccharomyces cerevisiae
MSISKYFTPVADGSLTFNGANIQFGADAQGESKKSYDAEDSMPNPANQLNDITFQAEAGEMVLVLGYPTSTLFKTLFHGKTSLSYSPPGSIKFKNNEFKS

SEQ ID NO: 572 - DNA, 300 bp, Saccharomyces cerevisiae
atgaccagtatgtcaattattgatgatgagaacgtgaaaaaaacttctaatggggcagctgttgtcactgatgtggctcaacacgctgtaagtgattcggacaataacaaagcgcaacttctaggcgatggatccaacactgaatatgtggttgatattttcattgaagccgctaaggatggggatttaaaagtggtgaaggacgtggtcgaaagtggagcagtggatattaataacgaccgcattgatgaattatccggcttacactgggcctgtataaacaataggttttctgtagca

SEQ ID NO: 573 - protein, 100 aa, Saccharomyces cerevisiae
MTSMSIIDDENVKKTSNGAAVVTDVAQHAVSDSDNNKAQLLGDGSNTEYVVDIFIEAAKDGDLKVVKDVVESGAVDINNDRIDELSGLHWACINNRFSVA

SEQ ID NO: 574 - DNA, 165 bp, Saccharomyces cerevisiae
atgatgaggtatcaatggtggctttatttagtatatgccatcggcctaatgctatgcctaggcccgtcgtatattcatccagatgaacatttccaatgcatcgagattttggctatgcagttcatgaaggtcaaaggtaccatcccatgggaatttaaatcaaaa

SEQ ID NO: 575 - protein, 55 aa, Saccharomyces cerevisiae
MMRYQWWLYLVYAIGLMLCLGPSYIHPDEHFQCIEILAMQFMKVKGTIPWEFKSK

SEQ ID NO: 576 - DNA, 231 bp, Saccharomyces cerevisiae
atgattcaaacgcaaagtacagcgatcaaacgacgtaattctgttcataaaaacctctttgatccatcactgtatcaaataccagaaccaccacgtggggggttccaacaccaaaaaaaagaatacagtaaggagacattcagtaatcaagtctttggatatgatattactagccttaaaaaaagattcacgcaactatttcctagtaatatacaagggtacttacctgaa

SEQ ID NO: 577 - protein, 77 aa, Saccharomyces cerevisiae
MIQTQSTAIKRRNSVHKNLFDPSLYQIPEPPRGGFQHQKKEYSKETFSNQVFGYDITSLKKRFTQLFPSNIQGYLPE

SEQ ID NO: 578 - DNA, 300 bp, Saccharomyces cerevisiae
atgtcttcgactgacgaacatattgagaaagacatttcgtcgagatcgaaccatgacgatgattatgctaattcggtacaatcctacgctgcctccgaaggccaagttgataatgaggatttggcagccacttctcagctatcccgtcacctttcaaacattctttccaatgaagaaggtattgaaaggttggagtctatggcgagagtcatttcacataagacaaagaaggaaatggactcttttgaaattaatgacttagattttgatttgcgctcactattacattatttgaggtct

SEQ ID NO: 579 - protein, 100 aa, Saccharomyces cerevisiae
MSSTDEHIEKDISSRSNHDDDYANSVQSYAASEGQVDNEDLAATSQLSRHLSNILSNEEGIERLESMARVISHKTKKEMDSFEINDLDFDLRSLLHYLRS

SEQ ID NO: 580 - DNA, 225 bp, Saccharomyces cerevisiae
atgtcgatgttaagaatctggagttgcatcgtacatttcttttccgtgcaggcacttgattcacgaataaagccagacattgaattcaaaaggcgacaaaggatatttatcaattcatctaaagaagagaatggttcatcttctagtgccgttactgttacccgtaaccctgtgctcagctctaatagcccatctcctccgctatggaatacatgggaatttaga

SEQ ID NO: 581 - protein, 75 aa, Saccharomyces cerevisiae
MSMLRIWSCIVHFFSVQALDSRIKPDIEFKRRQRIFINSSKEENGSSSSAVTVTRNPVLSSNSPSPPLWNTWEFR

SEQ ID NO: 582 - DNA, 300 bp, Saccharomyces cerevisiae
atgagtgaaacagtcaaagataaagttataattgatgagaaggtatccacaaaaggtactgttgattacgccgagggtgctgagtattctgagaggctttcaaatcattcatcagacttttctcagtggtatacggatgaacagatactgcactttatgaagaagctgggttatgaaaatcgcactctttatgatattccggaagacgttgcgtatatcctcaaaaaaatgcctgaattgacacttgaggattccttcaaaatactaaaagactctatcatctatttcaaggatgatgag

SEQ ID NO: 583 - protein, 100 aa, Saccharomyces cerevisiae
MSETVKDKVIIDEKVSTKGTVDYAEGAEYSERLSNHSSDFSQWYTDEQILHFMKKLGYENRTLYDIPEDVAYILKKMPELTLEDSFKILKDSIIYFKDDE

SEQ ID NO: 584 - DNA, 132 bp, Saccharomyces cerevisiae
atgaagagtactttgagtttaactttatgtgttatatcgcttctattaaccctttttctggcggccttggatattgttatagtggttactttatatgatacaattggcattaagttccatgacttcggcaat

SEQ ID NO: 585 - protein, 44 aa, Saccharomyces cerevisiae
MKSTLSLTLCVISLLLTLFLAALDIVIVVTLYDTIGIKFHDFGN

SEQ ID NO: 586 - DNA, 270 bp, Saccharomyces cerevisiae
atgagcgagggaactgtcaaagaaaacaataatgaagaattcaatgcttatcacacattgactacagaagaagccgctgaatttataggcacaagtctgactgaaggtcttactcaagatgagtccctccgcagactgaaagcagtgggagagaacacattgggtgatgataccaaaattgactataaagcaatggtcctccatcaggtatgtaatgcaatgattatggtcttggtaatatccatggcgatctctttcgctgtgcgcgac

SEQ ID NO: 587 - protein, 90 aa, Saccharomyces cerevisiae
MSEGTVKENNNEEFNAYHTLTTEEAAEFIGTSLTEGLTQDESLRRLKAVGENTLGDDTKIDYKAMVLHQVCNAMIMVLVISMAISFAVRD

SEQ ID NO: 588 - DNA, 270 bp, Saccharomyces cerevisiae
atgggcgaaggaactactaaggaaaacaataatgcagaattcaatgcttatcacacgctgactgcagaagaagccgctgaattcataggcacaagtctaactgaaggtttgacccaagatgagttcgtccacagattgaaaacagtgggtgagaacacattgggtgatgacactaaaattgattacaaggcaatggtcctccatcaggtatgtaatgccatgatcatggtccttctaatatccatgataatctcgtttgccatgcatgat

SEQ ID NO: 589 - protein, 90 aa, Saccharomyces cerevisiae
MGEGTTKENNNAEFNAYHTLTAEEAAEFIGTSLTEGLTQDEFVHRLKTVGENTLGDDTKIDYKAMVLHQVCNAMIMVLLISMIISFAMHD

SEQ ID NO: 590 - DNA, 111 bp, Saccharomyces cerevisiae
atgatctctgaaaaggctgctaccgctttagctactatagcaacagtttgctggtgtgtccagctaattccgcaaataatatataattggaaaaaaaaggactgtacgggg

SEQ ID NO: 591 - protein, 37 aa, Saccharomyces cerevisiae
MISEKAATALATIATVCWCVQLIPQIIYNWKKKDCTG

SEQ ID NO: 592 - DNA, 144 bp, Saccharomyces cerevisiae
atgtccgcctcagctcaacatagccaagcccaacaacaacaacaacaaaaaagctgtaattgcgatttgctattatggaggaaccctgttcaaaccggtaaatatttcggtgggtctctgttagccttgttaattttgaaaaaa

SEQ ID NO: 593 - protein, 48 aa, Saccharomyces cerevisiae
MSASAQHSQAQQQQQQKSCNCDLLLWRNPVQTGKYFGGSLLALLILKK

SEQ ID NO: 594 - DNA, 300 bp, Saccharomyces cerevisiae
atgttatcacactacatcttcctggcattcgttttattgccattcagagtttccgcgttttacttctatggttatggtggagacagaaaatgcttcctgaaggaactatccaaagacacccttttaaaaggttcttacaatttggaagtttacgatgataagttggcagattatgcgcttcccagttataatgactatggcattgtcatagatgtggaagaagtctttgataataatcatagggtagtccaccaacagggctctccttccggtgacttcagctttctagctttggaatct

SEQ ID NO: 595 - protein, 100 aa, Saccharomyces cerevisiae
MLSHYIFLAFVLLPFRVSAFYFYGYGGDRKCFLKELSKDTLLKGSYNLEVYDDKLADYALPSYNDYGIVIDVEEVFDNNHRVVHQQGSPSGDFSFLALES

SEQ ID NO: 596 - DNA, 300 bp, Saccharomyces cerevisiae
atgagatttcttcaggtttataaatcatcggcattaattggactaataatattgttagccagtaaagtaaatcttgcagaggcaaaaaggaagctggtagccacatcattggtcacatgtatggaaaactcgcagctgtcagcaaatagttttgacgttgttttcaatccagacgacaggtcattacattatgatcttgatatgtcaactcaaattgattcatatatttttgctgatattgatgtctacgcatatggtttcaagatcattactaaaaatgtcgatctttgttcaatcaac

SEQ ID NO: 597 - protein, 100 aa, Saccharomyces cerevisiae
MRFLQVYKSSALIGLIILLASKVNLAEAKRKLVATSLVTCMENSQLSANSFDVVFNPDDRSLHYDLDMSTQIDSYIFADIDVYAYGFKIITKNVDLCSIN

SEQ ID NO: 598 - DNA, 300 bp, Saccharomyces cerevisiae
atggcgaagactatcaaagttatcaggaagaaggaccccaaaaagaagaacctatccgatcctttagcaaaacaaaaactagtttggaaaatcggacacgttttaactttagtttttggtttattattttctatcacgtatttctaccatgtcctaatcttcttcaaatatcgttcctggaagtggttgttcttaagggtcaataaaaattactcgtttattcaaagtaagagatggtacatgaaacttttgagttggagcccacaggtaatgtaccgtttgtcattaattggcgtattt

SEQ ID NO: 599 - protein, 100 aa, Saccharomyces cerevisiae
MAKTIKVIRKKDPKKKNLSDPLAKQKLVWKIGHVLTLVFGLLFSITYFYHVLIFFKYRSWKWLFLRVNKNYSFIQSKRWYMKLLSWSPQVMYRLSLIGVF

SEQ ID NO: 600 - DNA, 300 bp, Saccharomyces cerevisiae
atgacaatttcgaataaatcgtggaggagctacttcccacatttgagaaaactacccgaagatgatcagtacttatactcagacgatactaactccagtatcatagctgaagaggagctacatcatagcgtagataagtcctcgaagacagacgttacggcagaaactacagctgtagaacctcatcctcacaatttaaggcatgacttgccatatgaagtgagagatgaagctgggcgtaaatggtggaaatattttgatgaattcgagtatcgtgttaataaggaatacaagaaatca

SEQ ID NO: 601 - protein, 100 aa, Saccharomyces cerevisiae
MTISNKSWRSYFPHLRKLPEDDQYLYSDDTNSSIIAEEELHHSVDKSSKTDVTAETTAVEPHPHNLRHDLPYEVRDEAGRKWWKYFDEFEYRVNKEYKKS

SEQ ID NO: 602 - DNA, 300 bp, Saccharomyces cerevisiae
atgagtgatcaagaatctgttgtttcattcaactcacaaaacacttccatggtggacgttgagggccaacaacctcaacagtatgtcccctcaaaaaccaactctcgtgcaaatcaacttaagttaactaagactgagaccgtcaagtctttacaagatttaggtgtcacttcagccgccccagtgcctgatatcaatgcgccacaaactgctaagaataacattttccctgaagaatataccatggaaacaccatctgggctggttccagtggctaccttacaatctatgggtagaacc

SEQ ID NO: 603 - protein, 100 aa, Saccharomyces cerevisiae
MSDQESVVSFNSQNTSMVDVEGQQPQQYVPSKTNSRANQLKLTKTETVKSLQDLGVTSAAPVPDINAPQTAKNNIFPEEYTMETPSGLVPVATLQSMGRT

SEQ ID NO: 604 - DNA, 249 bp, Saccharomyces cerevisiae
atgagcaacaaatttacaatggagtcacctaagcatttggtggatgatgtgcttttcatatcacccaccaatgatggatcagaagaaaagcctacggaagtcacgttccaggaagatgaaggccatgacgctagcttgcataatcgcagccatgacaagaagtcggaacttgccaccgaacgggaaattatggctactaccacggatgatgacggcatcccctccccttcccatccaatggaaaagcgt

SEQ ID NO: 605 - protein, 83 aa, Saccharomyces cerevisiae
MSNKFTMESPKHLVDDVLFISPTNDGSEEKPTEVTFQEDEGHDASLHNRSHDKKSELATEREIMATTTDDDGIPSPSHPMEKR

SEQ ID NO: 606 - DNA, 213 bp, Saccharomyces cerevisiae
atgtaccacacccatatgcatgaaagtttaatatctgtgacttcaacggtaagtgtttctgatgcgtcttatgcttatgcaaggctcactagaagagacgatagcgattcatcttcttcctcagcatccagcacgaaaaatagcaaatctgctgaatgtacaggctctaaacagcaatgtcaattacccacagattcgagtcacagcaccagt

SEQ ID NO: 607 - protein, 71 aa, Saccharomyces cerevisiae
MYHTHMHESLISVTSTVSVSDASYAYARLTRRDDSDSSSSSASSTKNSKSAECTGSKQQCQLPTDSSHSTS

SEQ ID NO: 608 - DNA, 183 bp, Saccharomyces cerevisiae
atggcaggagcaacatcaagtataattcgggaaaatgattttgaggacgagcttgcggagagtatgcagtcatataatagagaaactgcagacaaattggctttgactaggaccgagagtgtaaagccagaaccggagataaccgctccgcctcactcacgcttttcccgttctttcaagaca

SEQ ID NO: 609 - protein, 61 aa, Saccharomyces cerevisiae
MAGATSSIIRENDFEDELAESMQSYNRETADKLALTRTESVKPEPEITAPPHSRFSRSFKT

SEQ ID NO: 610 - DNA, 300 bp, Saccharomyces cerevisiae
atgacaggtccaatagtgtacgttcaaaatgcggacggtatcttcttcaagcttgctgagggcaaaggaactaacgatgctgttattcacttggccaatcaagatcaaggtgttcgggtccttggagcagaggaatttcctgtgcaaggtgaagtagtaaagattgcgtccttgatggggttcattaagctaaagttgaacaggtatgccattatcgcaaatactgtggaagagaccggtagattcaatggccacgttttctatagagtgttgcaacattctatcgtatctaccaagttt

SEQ ID NO: 611 - protein, 100 aa, Saccharomyces cerevisiae
MTGPIVYVQNADGIFFKLAEGKGTNDAVIHLANQDQGVRVLGAEEFPVQGEVVKIASLMGFIKLKLNRYAIIANTVEETGRFNGHVFYRVLQHSIVSTKF

SEQ ID NO: 612 - DNA, 300 bp, Saccharomyces cerevisiae
atgatacaatcagacgaagataatttggactcttctgaaacgacagcatcaacttcatatagtggtacttcctctgtatcatccagactacaactaagaacatccttgttttttgaaaatcttaatggagcacatgggaaccccgatgcggagacagagatggctactgttgcctatgaaaccacaagtagaggtcaaggatttgctgtatacatcaacaatgaaaggttttctcaaataatgggagcatccacaagctctagctctagtagcaactcgtcctctattacacaatttcac

SEQ ID NO: 613 - protein, 100 aa, Saccharomyces cerevisiae
MIQSDEDNLDSSETTASTSYSGTSSVSSRLQLRTSLFFENLNGAHGNPDAETEMATVAYETTSRGQGFAVYINNERFSQIMGASTSSSSSSNSSSITQFH

SEQ ID NO: 614 - DNA, 300 bp, Saccharomyces cerevisiae
atgaattttaaaatactcctcccgatttgtgctttattgacacttacaacatttctgttgaccattattgcaactgcgggttctacctcaaattataagccaataacgaacatttatatcggtgatgctgatatatcaaaaatcaacgttacaaaagttatgccacaagttggcccaattttgactgtgttaggttctgctctaaccgctccaaatacaacggtggataccatcttcggcgctcttaaggcaatcgcttctaccgaagccttgtctcctttactgcacttgttgtctaat

SEQ ID NO: 615 - protein, 100 aa, Saccharomyces cerevisiae
MNFKILLPICALLTLTTFLLTIIATAGSTSNYKPITNIYIGDADISKINVTKVMPQVGPILTVLGSALTAPNTTVDTIFGALKAIASTEALSPLLHLLSN

SEQ ID NO: 616 - DNA, 300 bp, Saccharomyces cerevisiae
atgaggaattttttcacgttattttttgcagctatattttcgctaggagcacttatattagccattgttgcatgcgcaggatcaacgaaaaattacagtcccataaataaaatttactgtgcagaattggatctgtcgcagatgaaggtatcgacggtgctcccttctttgagttctgctacgctatcttcgttgggcctgccctcatatataaatatagggctttggtcgtactgtacagtggactcctcgcataacatccaatcatgttcttcgcctcacggtatccagaattttaac

SEQ ID NO: 617 - protein, 100 aa, Saccharomyces cerevisiae
MRNFFTLFFAAIFSLGALILAIVACAGSTKNYSPINKIYCAELDLSQMKVSTVLPSLSSATLSSLGLPSYINIGLWSYCTVDSSHNIQSCSSPHGIQNFN

SEQ ID NO: 618 - DNA, 102 bp, Saccharomyces cerevisiae
atgaatagtactaatagtactaatagtactacaacagctaccagtacaaacacgtcaactcaacaagtcgttacttctttggtaagtaatggtactattttt

SEQ ID NO: 619 - protein, 34 aa, Saccharomyces cerevisiae
MNSTNSTNSTTTATSTNTSTQQVVTSLVSNGTIF

SEQ ID NO: 620 - DNA, 297 bp, Saccharomyces cerevisiae
atgtcacgaagtaacagtatatacacagaagatattgagatgtatcctactcacaatgagcagcatctgacgagagaatacacaaaaccagatggtcaaacgaaaagtgaaaaactaaatttcgaaggcgcttatatcaacagtcacgggactctatccaagactaccacaagggaaatagaaggcgatttagactctgagacttcttctcactccagtgatgataaagttgatccaacccaacagataactgcagagacaaaagcgccatatactttactaagttacggtcagaag

SEQ ID NO: 621 - protein, 99 aa, Saccharomyces cerevisiae
MSRSNSIYTEDIEMYPTHNEQHLTREYTKPDGQTKSEKLNFEGAYINSHGTLSKTTTREIEGDLDSETSSHSSDDKVDPTQQITAETKAPYTLLSYGQK

SEQ ID NO: 622 - DNA, 300 bp, Saccharomyces cerevisiae
atgtcctacaaaaagtttgtgtactttattaaccttttctttctactaggggctacattgttgactttttttctgatactagcaggtggcaggaccacaggagtgttgaagaatttttattggtttcaggcatccacttcgggctttaactcggcgccctccgtaaccagatggtacaattataactggtgcggctgggaaagccgcggaatagcagtcaactgctcttctaagatggcagctcagccgttttcaccaagggacaactttggcagttcccccctcatgccctcaactttt

SEQ ID NO: 623 - protein, 100 aa, Saccharomyces cerevisiae
MSYKKFVYFINLFFLLGATLLTFFLILAGGRTTGVLKNFYWFQASTSGFNSAPSVTRWYNYNWCGWESRGIAVNCSSKMAAQPFSPRDNFGSSPLMPSTF

SEQ ID NO: 624 - DNA, 300 bp, Saccharomyces cerevisiae
atgaagattttaacccaagacgaaattgaagctcatcgctcacatacgctaaaaggtggtattgaaggtgcccttgccggatttgcaatctctgctataattttcaaagtcctaccaagaaggtacccaaaattcaagccttcgactctaacatggtccataaaaaccgccctttggatcacccctcccacggtcttgactgctatatgtgcggaggaggcctcgaacaatttcgacgctacaatgtacggatccggttcctcctcggaagacgcactagatgagcacagaagatggaag

SEQ ID NO: 625 - protein, 100 aa, Saccharomyces cerevisiae
MKILTQDEIEAHRSHTLKGGIEGALAGFAISAIIFKVLPRRYPKFKPSTLTWSIKTALWITPPTVLTAICAEEASNNFDATMYGSGSSSEDALDEHRRWK

SEQ ID NO: 626 - DNA, 138 bp, Saccharomyces cerevisiae
atgaacagagtaggggcagtgttcctatttgtatatgaaagaaatttttttttgtctattgttccagatcgtcacaggacggaaataagaatgtctagttcagaaaggtcagaagtcaagtttgacaagcactttaat

SEQ ID NO: 627 - protein, 46 aa, Saccharomyces cerevisiae
MNRVGAVFLFVYERNFFLSIVPDRHRTEIRMSSSERSEVKFDKHFN

SEQ ID NO: 628 - DNA, 264 bp, Saccharomyces cerevisiae
atgaagaaaaattcttcggtagttttcttccttgtgggtctatcacaattcgtcactatggcgtttctcattatcggatccattacggctccaattttcaaacaaataggctattctaaatatgatgagatcacatacggtacattcggctactgtaaagagggctcctgctcaaaagcaagttataattatcaccccgatgagctatcagacagtgatagcaactggaaactcaatagcaacgctaggtctatattggggaaa

SEQ ID NO: 629 - protein, 88 aa, Saccharomyces cerevisiae
MKKNSSVVFFLVGLSQFVTMAFLIIGSITAPIFKQIGYSKYDEITYGTFGYCKEGSCSKASYNYHPDELSDSDSNWKLNSNARSILGK

SEQ ID NO: 630 - DNA, 300 bp, Saccharomyces cerevisiae
atggaaagagtatggtttgcaaaattaacaaataaaggaactattaaaatcgggtatatctcatttatacttctaagtttgctatgtcaatctctgattgggctggttaatgctgattttaattatgaaggctgttacagtgccgcggatatccagtctgctggactgtctctgaaaaactcatacatatatcaatcagtgtcatactgtcaaaaccagtgccctgagtcagcagtagtagcattatttaacgggtcagattgttactgcggtaattcggtaagttttctgacttctttg

SEQ ID NO: 631 - protein, 100 aa, Saccharomyces cerevisiae
MERVWFAKLTNKGTIKIGYISFILLSLLCQSLIGLVNADFNYEGCYSAADIQSAGLSLKNSYIYQSVSYCQNQCPESAVVALFNGSDCYCGNSVSFLTSL

SEQ ID NO: 632 - DNA, 300 bp, Saccharomyces cerevisiae
atggccaaagaagatactggggtaacagcaccaaagaagcccgaaacagcccaagtagctaacataaatgggatagataagttagaacctccaaagacgaaagaggaaaccgaatccagtaaaagcgtgtcatctgagaaggcggcacatgctagtgatgaaagcttcaagagaagtatccatgaagcttcttatgtcggctggaaacagattggtggctgggaagacaaagacgaattaactttagatgatgaattgatggatatgactagagaaaccttcttagataacatcataccg

SEQ ID NO: 633 - protein, 100 aa, Saccharomyces cerevisiae
MAKEDTGVTAPKKPETAQVANINGIDKLEPPKTKEETESSKSVSSEKAAHASDESFKRSIHEASYVGWKQIGGWEDKDELTLDDELMDMTRETFLDNIIP

SEQ ID NO: 634 - DNA, 126 bp, Saccharomyces cerevisiae
atgaacgtttgcaagttgaaagaaatagtaccactatttccgagatcgtcctttacagatggtgtagtaagtacaggaaaaagtttccgaagctgggacacctgcatggacaataaagcatgtaaa

SEQ ID NO: 635 - protein, 42 aa, Saccharomyces cerevisiae
MNVCKLKEIVPLFPRSSFTDGVVSTGKSFRSWDTCMDNKACK

SEQ ID NO: 636 - DNA, 246 bp, Saccharomyces cerevisiae
atgccattgaatgaaaaatacgagaggcctccgcaacctcctccagcatatgatcccaaccataggccgcccagttcttccgagaactctgccgcggcgaatgtcaacgatggccagacgccgtaccattttagacaggatcaatattacaatctaaattccaaaacgagtggggctcctatagggagcttcgacgaggcctttcctactgaaaatgacaacaagcccaggtggaacgattggcca

SEQ ID NO: 637 - protein, 82 aa, Saccharomyces cerevisiae
MPLNEKYERPPQPPPAYDPNHRPPSSSENSAAANVNDGQTPYHFRQDQYYNLNSKTSGAPIGSFDEAFPTENDNKPRWNDWP

SEQ ID NO: 638 - DNA, 273 bp, Saccharomyces cerevisiae
atgccttcttctttgacaaaaaccgaatctaactcagatcctcgaacaaacatacagcaggtaccaaaagccttggacaaaaatgtaactaatagcggcaacttggattcgacttcttcttcgacagggtcaataacagaggacgaaaaaagatcagaaccgaatgcagattccaataacatgacagggggcgagccaattgacccaagagatctcgattgggacgggcccgatgacccagacaatccgcataattggtcctctttgaagaaa

SEQ ID NO: 639 - protein, 91 aa, Saccharomyces cerevisiae
MPSSLTKTESNSDPRTNIQQVPKALDKNVTNSGNLDSTSSSTGSITEDEKRSEPNADSNNMTGGEPIDPRDLDWDGPDDPDNPHNWSSLKK

SEQ ID NO: 640 - DNA, 300 bp, Saccharomyces cerevisiae
atgcaagtactagtgacgctctggtgtctaatatgcacatgcctggtactaccagtggccgccaagaaaaggacactgacagcgagttcactggtcacgtgcatggagaactcacagctttcagccaatagtttcgatgtgtcgttttctccagacgatcgatcgctacattacgatctggatatgaccacgcagatcgactcttacatctacgcttatgtggacgtgtatgcctacgggttcaagattattacggagaacttcgacgtgtgttcaatgggttggaagcagttttgccct

SEQ ID NO: 641 - protein, 100 aa, Saccharomyces cerevisiae
MQVLVTLWCLICTCLVLPVAAKKRTLTASSLVTCMENSQLSANSFDVSFSPDDRSLHYDLDMTTQIDSYIYAYVDVYAYGFKIITENFDVCSMGWKQFCP

SEQ ID NO: 642 - DNA, 300 bp, Saccharomyces cerevisiae
atgtcttcagacaaatctattgagaaaaatacagatacgatcgcctctgaagttcacgaaggtgataatcattcgaataatttgggttcaatggaggaagagataaaatcaacgccatcagaccaatatgaagagatagctataattccaactgagcccctccattcggacaaagaactaaatgacaagcaacaaagtttaggccatgaagcacccacaaatgtatcaagagaagaacctattgggatctctggtgatgaagacacccaaatcactgaacaaaacgttaatgaacaaagg

SEQ ID NO: 643 - protein, 100 aa, Saccharomyces cerevisiae
MSSDKSIEKNTDTIASEVHEGDNHSNNLGSMEEEIKSTPSDQYEEIAIIPTEPLHSDKELNDKQQSLGHEAPTNVSREEPIGISGDEDTQITEQNVNEQR

SEQ ID NO: 644 - DNA, 300 bp, Saccharomyces cerevisiae
atgacatcaaataattcgttattggggcgtggaaggatgtcatattcctctaccgctccaccaagattcaaaagatcagtcgaccagcgtgacactttctcggacaattttgattatgataaggattcatccaatcgaggcaggacctatattgcagcatctaattcaactactggggtacccccacccaacaactcaagatcaggatgcaccaataatacaaataatacaaataatacaagtaatacaagtaatacgaacaataatgatagcgttgatgagaatacagtgtttgaaact

SEQ ID NO: 645 - protein, 100 aa, Saccharomyces cerevisiae
MTSNNSLLGRGRMSYSSTAPPRFKRSVDQRDTFSDNFDYDKDSSNRGRTYIAASNSTTGVPPPNNSRSGCTNNTNNTNNTSNTSNTNNNDSVDENTVFET

SEQ ID NO: 646 - DNA, 141 bp, Saccharomyces cerevisiae
atggctcggggtgacggacatctatggacagagacatatgatagttccacagtcgcttttatgattttaggtgccgccctggttttcttcatggtaccggggctgggctttctttattccggtttagcaagaagaaaatct

SEQ ID NO: 647 - protein, 47 aa, Saccharomyces cerevisiae
MARGDGHLWTETYDSSTVAFMILGAALVFFMVPGLGFLYSGLARRKS

SEQ ID NO: 648 - DNA, 300 bp, Saccharomyces cerevisiae
atgaacagacaggaatccataaattcgtttaattcagacgaaacatcttcgttgtctgatgtagaaagtcagcagccgcaacaatatatcccttcagagagtggatctaaatccaacatggctcctaatcaactgaagttgacccggacggaaaccgtgaagtcattgcaggacatgggtgtgagctccaaagcccccgttcctgatgttaatgctcctcaatctagcaagaataagatttttcctgaagaatatactttagaaacccctacaggtttagttcctgtcgccactctacat

SEQ ID NO: 649 - protein, 100 aa, Saccharomyces cerevisiae
MNRQESINSFNSDETSSLSDVESQQPQQYIPSESGSKSNMAPNQLKLTRTETVKSLQDMGVSSKAPVPDVNAPQSSKNKIFPEEYTLETPTGLVPVATLH

SEQ ID NO: 650 - DNA, 300 bp, Saccharomyces cerevisiae
atgtctctggcacattattgtttactactagccatcgtcacattgctgggattaactaatgttgtctctgcgactacagcggcatgcctgccagcaaactcaaggaagaatggtatgaatgtaaacttttaccagtattcattgagagattcctccacatattcgaatgcagcatatatggcttatggatatgcctcaaaaactaaactgggttctgtcggaggacaaactgatatctcgattgattataatattccttgtgttagttcatcaggcacatttccttgtcctcaagaagat

SEQ ID NO: 651 - protein, 100 aa, Saccharomyces cerevisiae
MSLAHYCLLLAIVTLLGLTNVVSATTAACLPANSRKNGMNVNFYQYSLRDSSTYSNAAYMAYGYASKTKLGSVGGQTDISIDYNIPCVSSSGTFPCPQED

SEQ ID NO: 652 - DNA, 300 bp, Saccharomyces cerevisiae
atgacaatgcctcatcgctatatgtttttggcagtctttacacttctggcactaactagtgtggcctcaggagccacagaggcgtgcttaccagcaggccagaggaaaagtgggatgaatataaatttttaccagtattcattgaaagattcctccacatattcgaatgcagcatatatggcttatggatatgcctcaaaaaccaaactaggttctgtcggaggacaaactgatatctcgattgattataatattccctgtgttagttcatcaggcacatttccttgtcctcaagaagat

SEQ ID NO: 653 - protein, 100 aa, Saccharomyces cerevisiae
MTMPHRYMFLAVFTLLALTSVASGATEACLPAGQRKSGMNINFYQYSLKDSSTYSNAAYMAYGYASKTKLGSVGGQTDISIDYNIPCVSSSGTFPCPQED

SEQ ID NO: 654 - DNA, 300 bp, Saccharomyces cerevisiae
atgcctgtggctgctcgatatatatttttgaccggcctatttttgctatctgtagctaatgttgctctaggtactacagaggcttgtttgccagctggagagaagaaaaatggtatgactataaacttttaccaatattccttaaaagattcatctacatactcaaatccgtcatatatggcctatggttatgctgatgcagaaaaactgggttctgtaagtgggcaaacaaagctttccatcgattattccatcccatgtaatggcgcatcagatacttgtgcttgttccgatgatgat

SEQ ID NO: 655 - protein, 100 aa, Saccharomyces cerevisiae
MPVAARYIFLTGLFLLSVANVALGTTEACLPAGEKKNGMTINFYQYSLKDSSTYSNPSYMAYGYADAEKLGSVSGQTKLSIDYSIPCNGASDTCACSDDD

SEQ ID NO: 656 - DNA, 300 bp, Saccharomyces cerevisiae
atgaagaaacaaatattaatagttgctgcacaaagtattttatgttctactgtttttggcgagcgaagtaatgtaggcctttccactgaagagctaggaggtgactcaattttatacttcaatgaagaccctatagtgattgaaatcgataagaaagctattgacaagaagactttggaacagttggcaagcacaagagatgttgttcttactgatttaccggacactcttgagtttatagacttcaacgagtacgcgaaaatgaagtcaaaatcagatatgctactagagtatatcaac

SEQ ID NO: 657 - protein, 100 aa, Saccharomyces cerevisiae
MKKQILIVAAQSILCSTVFGERSNVGLSTEELGGDSILYFNEDPIVIEIDKKAIDKKTLEQLASTRDVVLTDLPDTLEFIDFNEYAKMKSKSDMLLEYIN

SEQ ID NO: 658 - DNA, 300 bp, Saccharomyces cerevisiae
atgaacttgaagcagttcacgtgcctatcatgcgctcaattactcgctattctgctctttatctttgcttttttccctagaaaaatcgtgctgacaggtatatcaaagcaagatccggatcaagaccgtgatctccagcgcgataggcccttccagaaattggtgtttgtgatcattgatgctctcagatcagactttctttttgattcgcagatttcccacttcaacaacgtgcaccaatggctcaatacgggcgaagcatggggttacacgtcatttgctaatccgcctaccgtgacg

SEQ ID NO: 659 - protein, 100 aa, Saccharomyces cerevisiae
MNLKQFTCLSCAQLLAILLFIFAFFPRKIVLTGISKQDPDQDRDLQRDRPFQKLVFVIIDALRSDFLFDSQISHFNNVHQWLNTGEAWGYTSFANPPTVT

SEQ ID NO: 660 - DNA, 300 bp, Saccharomyces cerevisiae
atgaaggaagagctcagcaaagtgagcagtatgcaaaatttcgagatgatccagcgtgaacgattgccaacattgtatgaagtgttaatacagaggacatcgcagccagttgatctctggactttttatacatttctttcacaattcccatatgccatcaactatctggacttttgggttgaccttatgacacatacacgactttgcaaaaactacatagagttggtaagaaaatcattaatcaactttccacaagaacaacagcagaatggaagtacatctacggctacatttgacttg

SEQ ID NO: 661 - protein, 100 aa, Saccharomyces cerevisiae
MKEELSKVSSMQNFEMIQRERLPTLYEVLIQRTSQPVDLWTFYTFLSQFPYAINYLDFWVDLMTHTRLCKNYIELVRKSLINFPQEQQQNGSTSTATFDL

SEQ ID NO: 662 - DNA, 300 bp, Saccharomyces cerevisiae
atgatcaaatctacaattgctctaccctctttcttcattgttttaattttggcgttggtcaattcagtggctgcatcttccagttatgcaccagttgctatcagtttaccagcattcagcaaagaatgcctgtactacgatatggttactgaggatgattccctggctgtgggttaccaagttctaaccggtggtaattttgagattgattttgatattactgctcctgatggatctgtgattactagtgagaaacaaaagaagtactcagactttttattaaaatcgtttggagtgggg

SEQ ID NO: 663 - protein, 100 aa, Saccharomyces cerevisiae
MIKSTIALPSFFIVLILALVNSVAASSSYAPVAISLPAFSKECLYYDMVTEDDSLAVGYQVLTGGNFEIDFDITAPDGSVITSEKQKKYSDFLLKSFGVG

SEQ ID NO: 664 - DNA, 156 bp, Saccharomyces cerevisiae
atgtctaccacactactttggttttcaagtgtaataggctacgtgattcaaacaaaatgtttgtctaacatacaatctaaaaaggaaatctccgtggggcccaatggtacaattgcaacgcctgaaactaacggcgacaacggaaactcaagttca

SEQ ID NO: 665 - protein, 52 aa, Saccharomyces cerevisiae
MSTTLLWFSSVIGYVIQTKCLSNIQSKKEISVGPNGTIATPETNGDNGNSSS

SEQ ID NO: 666 - DNA, 102 bp, Saccharomyces cerevisiae
atgaatcctcaagtcagtaacatcatcatcatgttggtcatgatgcaactctcccgtcgcattgacatggaggacccaaccatcatcatgtacattagaatt

SEQ ID NO: 667 - protein, 34 aa, Saccharomyces cerevisiae
MNPQVSNIIIMLVMMQLSRRIDMEDPTIIMYIRI

SEQ ID NO: 668 - DNA, 162 bp, Saccharomyces cerevisiae
atgtcaggaaccggattatcgctattcgtgacgggtcttatactgaattgtttgaattccatttgccagatatactttactatattatatggtgatcttgaagcagactatatcaactcaatcgaactgtgtaagagggtgaataggttgagtgtaccagag

SEQ ID NO: 669 - protein, 54 aa, Saccharomyces cerevisiae
MSGTGLSLFVTGLILNCLNSICQIYFTILYGDLEADYINSIELCKRVNRLSVPE

SEQ ID NO: 670 - DNA, 300 bp, Saccharomyces cerevisiae
atgaagataacgtgtacagacttggtgtacgtcttcattttactcttcctaaacacgagttgtgtccaagccgttttttcagatgatgcatttatcactgattggcaactggctaacttaggtccttgggagaaagtcatccctgattctcgagaccgcaacagggttctcatcttatcgaaccctaccgaaacttcctgcttagtttcttcgtttaacgtttcttccggacagattcttttcagaaacgttttaccctttaccattgatgagattcaactggatagtaatgaccataac

SEQ ID NO: 671 - protein, 100 aa, Saccharomyces cerevisiae
MKITCTDLVYVFILLFLNTSCVQAVFSDDAFITDWQLANLGPWEKVIPDSRDRNRVLILSNPTETSCLVSSFNVSSGQILFRNVLPFTIDEIQLDSNDHN

SEQ ID NO: 672 - DNA, 300 bp, Saccharomyces cerevisiae
atgaggttagctgtggttgtgaccctacttgttcactgtttcctagtgacatgctctccaggagataatttagatgagtttatagactgtacgtatgcgtgcgagtataacagaagatgtccgaattcccaaataaactacattgaccctgaaaccaacatgtttcatgatattgagtttttcgataccccgcctttgtactctaagttattgttctgggattgtatctcagattgtgattaccaatgtcagcacatcattacgcgctggagaattgacgaagaggaagaaatataccaa

SEQ ID NO: 673 - protein, 100 aa, Saccharomyces cerevisiae
MRLAVVVTLLVHCFLVTCSPGDNLDEFIDCTYACEYNRRCPNSQINYIDPETNMFHDIEFFDTPPLYSKLLFWDCISDCDYQCQHIITRWRIDEEEEIYQ

SEQ ID NO: 674 - DNA, 300 bp, Saccharomyces cerevisiae
atgtccaatttatgtgtacttttcttccagtttttttttttagcacaattttttgctgaggcatcaccgttgacatttgaactgaataaaggtcgaaaggagtgcttatatacgctaactccggaaattgactgtacaatctcatattattttgcagtacagcaaggagagagcaatgactttgatgttaactacgaaatatttgctcctgatgacaaaaacaagccaataatcgagagatctggtgaacgtcaaggtgaatggtcatttataggccaacataagggagaatatgctatc

SEQ ID NO: 675 - protein, 100 aa, Saccharomyces cerevisiae
MSNLCVLFFQFFFLAQFFAEASPLTFELNKGRKECLYTLTPEIDCTISYYFAVQQGESNDFDVNYEIFAPDDKNKPIIERSGERQGEWSFIGQHKGEYAI

SEQ ID NO: 676 - DNA, 138 bp, Saccharomyces cerevisiae
atgtcattatattacaccttggtttttgccattctagtggtggagattttcatgttctccattctagccctaccaatcccttctagataccgtaggcctctcaccttactgttattaaagccgttcaaatcctccaca

SEQ ID NO: 677 - protein, 46 aa, Saccharomyces cerevisiae
MSLYYTLVFAILVVEIFMFSILALPIPSRYRRPLTLLLLKPFKSST

SEQ ID NO: 678 - DNA, 111 bp, Saccharomyces cerevisiae
atgtgttgctactgtgtttgttgtaccgtttctgactttatactgtatattgttgcgttttttttccccccagctgcagtccttcttcgatctgggccttgttcatctgat

SEQ ID NO: 679 - protein, 37 aa, Saccharomyces cerevisiae
MCCYCVCCTVSDFILYIVAFFFPPAAVLLRSGPCSSD

SEQ ID NO: 680 - DNA, 183 bp, Saccharomyces cerevisiae
atgttctcatattcagatttctgttctatcggtacggccatgatcttatcggccacaacgttcctaatgggtgttttcttcagtaacatgccatacgattatcatcttttatttaatcctaactctactcaagagcatttcgatttggcactgagacattaccaaattttacatgagactcca

SEQ ID NO: 681 - protein, 61 aa, Saccharomyces cerevisiae
MFSYSDFCSIGTAMILSATTFLMGVFFSNMPYDYHLLFNPNSTQEHFDLALRHYQILHETP

SEQ ID NO: 682 - DNA, 102 bp, Saccharomyces cerevisiae
atgaatgtcatattttctttggcgagtttcgtcaaaaacatgtataatgcaagtttgaaccaacgtaatctaataagcctgccgttcaacttcatgcttaat

SEQ ID NO: 683 - protein, 34 aa, Saccharomyces cerevisiae
MNVIFSLASFVKNMYNASLNQRNLISLPFNFMLN

SEQ ID NO: 684 - DNA, 300 bp, Saccharomyces cerevisiae
atgcgtatagcgatgcatctgccgctgttgcttttatacatattcttactacccctttcaggtgcaaataacacagatgctgcacacgaagttatagcaacgaacacaaataattgggccgtattagtatccacgtcgcggttctggttcaattacaggcacatggctaatgtccttagtatgtataggactgtaaagaggttaggtataccggattcacaaataatattgatgctgagtgatgatgtggcctgcaattcaaggaatctatttcctggaagtgtttttaacaataaggat

SEQ ID NO: 685 - protein, 100 aa, Saccharomyces cerevisiae
MRIAMHLPLLLLYIFLLPLSGANNTDAAHEVIATNTNNWAVLVSTSRFWFNYRHMANVLSMYRTVKRLGIPDSQIILMLSDDVACNSRNLFPGSVFNNKD

SEQ ID NO: 686 - DNA, 300 bp, Saccharomyces cerevisiae
atgacatgcctaattttatggtatctgtggctcatatcaacttttcagttagagtttgcaacggctagtactgcaaatacaacaactacagcaaagtctggaacctcttcgtcaacggaggagccgtttcctgtactagccgtgggtaaagatggtagaggaaactactatgttaatagcacatttggcactcccggtcaacgccaacgtttgctagtggatattatccaaccgtacataaatctggtttccggaacaagcgaaagtcataacgaatactccggtgtatatcataagcat

SEQ ID NO: 687 - protein, 100 aa, Saccharomyces cerevisiae
MTCLILWYLWLISTFQLEFATASTANTTTTAKSGTSSSTEEPFPVLAVGKDGRGNYYVNSTFGTPGQRQRLLVDIIQPYINLVSGTSESHNEYSGVYHKH

SEQ ID NO: 688 - DNA, 150 bp, Saccharomyces cerevisiae
atgagatcatctcttctaacccttccaaaatcttttttggggtttatgccgctataccttgcagttgagattgtcttaggtatttccattctaaacaaatgcagtggtgcttatggtattttagcattgttcacgggtcatccgttggat

SEQ ID NO: 689 - protein, 50 aa, Saccharomyces cerevisiae
MRSSLLTLPKSFLGFMPLYLAVEIVLGISILNKCSGAYGILALFTGHPLD

SEQ ID NO: 690 - DNA, 300 bp, Saccharomyces cerevisiae
atgcggaccgattggaattttttcttttgtatccttctgcaggccattttcgttgtgggcacacaaacttcaagaacgcttgttctttacgaccaatctacggaacctttagaggagtactcagtctatttaaaagatctagaacaaaggaattacaaacttgaatatttagatattaacagtacttccactactgtggatttgtatgacaaagagcaaagattgtttgataacatcatcgtttttcctaccaaaggaggcaagaatttagcgagacaaatcccagttaagcagttgatt

SEQ ID NO: 691 - protein, 100 aa, Saccharomyces cerevisiae
MRTDWNFFFCILLQAIFVVGTQTSRTLVLYDQSTEPLEEYSVYLKDLEQRNYKLEYLDINSTSTTVDLYDKEQRLFDNIIVFPTKGGKNLARQIPVKQLI

SEQ ID NO: 692 - DNA, 159 bp, Saccharomyces cerevisiae
atgactgaattgtgtcctgtctacgcccctttctttggtgccattggttgtgcctctgcaattatcttcacctcattaggtgctgcttacggtactgctaagtctggtgttggtatctgtgccacttgtgtgttgagaccagacctattattcaagaac

SEQ ID NO: 693 - protein, 53 aa, Saccharomyces cerevisiae
MTELCPVYAPFFGAIGCASAIIFTSLGAAYGTAKSGVGICATCVLRPDLLFKN

SEQ ID NO: 694 - DNA, 300 bp, Saccharomyces cerevisiae
atgatgatgttaattactatgaaaagtacagtactgttgagtgtttttaccgtcttagcgacatgggctggattgctagaagctcatccattgggtgacacttcagatgcatccaaattaagctcagactactcgctccctgatctcattaatgcacgtaaagtgcccaataactggcaaactggagaacaagctagtctagaggaagggagaattgtattgacttctaagcaaaattccaagggttcactttggttgaagcaaggattcgatttgaaggattcttttactatggagtgg

SEQ ID NO: 695 - protein, 100 aa, Saccharomyces cerevisiae
MMMLITMKSTVLLSVFTVLATWAGLLEAHPLGDTSDASKLSSDYSLPDLINARKVPNNWQTGEQASLEEGRIVLTSKQNSKGSLWLKQGFDLKDSFTMEW

SEQ ID NO: 696 - DNA, 300 bp, Saccharomyces cerevisiae
atgaacggttactggaaacctgcgttggttgtcctgggattggtatctctatcatatgcttttaccaccattgaaacagaaattttccaattacaaaatgaaataagtacgaaatatggcccagatatgaacttctacaagttcttgaagttacctaaactgcagaattctagtacaaaggagattacaaaaaacttaagaaagctatccaagaagtaccatccggataagaaccctaaataccgtaaattgtatgaaaggttaaacctcgctactcaaattctttcaaacagctctaat

SEQ ID NO: 697 - protein, 100 aa, Saccharomyces cerevisiae
MNGYWKPALVVLGLVSLSYAFTTIETEIFQLQNEISTKYGPDMNFYKFLKLPKLQNSSTKEITKNLRKLSKKYHPDKNPKYRKLYERLNLATQILSNSSN

SEQ ID NO: 698 - DNA, 300 bp, Saccharomyces cerevisiae
atgcattgggcagcagcggtagcgatattctttattgtggtcacaaagtttctacagtatacaaacaaataccacgagaaatggatctctaaatttgcaccaggaaatgaattatccaaaaaatacttagccaaggtcaaagaacgtcacgaattaaaagaattcaacaactctatctccgcgcaggataattatgccaaatggactaagaacaatagaaaattggactcgttagataaagaaataaataacttgaaggacgaaatacaatcagaaaataaagcctttcaggcccatctt

SEQ ID NO: 699 - protein, 100 aa, Saccharomyces cerevisiae
MHWAAAVAIFFIVVTKFLQYTNKYHEKWISKFAPGNELSKKYLAKVKERHELKEFNNSISAQDNYAKWTKNNRKLDSLDKEINNLKDEIQSENKAFQAHL

SEQ ID NO: 700 - DNA, 168 bp, Saccharomyces cerevisiae
atgggtgcttggttatttatccttgctgttgttgtcaactgtatcaatttgtttggccaagtgcatttcacaatactatacgctgatttagaagctgactatatcaatccaattgaattatgttctaaagttaacaagttaattacccctgaagccgccttgcatggt

SEQ ID NO: 701 - protein, 56 aa, Saccharomyces cerevisiae
MGAWLFILAVVVNCINLFGQVHFTILYADLEADYINPIELCSKVNKLITPEAALHG

SEQ ID NO: 702 - DNA, 300 bp, Saccharomyces cerevisiae
atgttttacaataggtggctcggaacgtggctagccatgtctgctttaataaggatctcagtatcccttccgtcatctgaggagtacaaagtggcatatgagctgttgccagggttatctgaagtgccagacccttcaaatattccacagatgcatgctggccatattcctttacgttccgaagatgcggatgaacaggatagctctgacttggagtactttttttggaagtttaccaataacgactctaatggcaatgtcgaccgtcccttaattatatggttaaatggtggacccggt

SEQ ID NO: 703 - protein, 100 aa, Saccharomyces cerevisiae
MFYNRWLGTWLAMSALIRISVSLPSSEEYKVAYELLPGLSEVPDPSNIPQMHAGHIPLRSEDADEQDSSDLEYFFWKFTNNDSNGNVDRPLIIWLNGGPG

SEQ ID NO: 704 - DNA, 300 bp, Saccharomyces cerevisiae
atgaaacagcgtttttctcaagtagcaactgttatattcttcgtcatgagtatccgttctccaagaaatctcggctttttttttactcttgccctttttgtcgtacttgtttgctcccaggaatggttctcctttgaaatgaatagatcttgttcaatgaaagtggaacatagaatgcaatttttgtcaactataatcagtgaacatcagaaatcggatgtgaattgttgggaccaaatcgcaaagaagatgaatgtatacttatttgagcagaaagtttccggctcagacgtgtttttc

SEQ ID NO: 705 - protein, 100 aa, Saccharomyces cerevisiae
MKQRFSQVATVIFFVMSIRSPRNLGFFFTLALFVVLVCSQEWFSFEMNRSCSMKVEHRMQFLSTIISEHQKSDVNCWDQIAKKMNVYLFEQKVSGSDVFF

SEQ ID NO: 706 - DNA, 300 bp, Saccharomyces cerevisiae
atgcgtctacttcgaagaaacatgttagtattgacactgctcgtttgtgtgttttcatccatcatttcatgctcaatcccattgtcgtctcgcacctcaaggcggcagatagtggaagatgaagttgcctccactaaaaagctcaatttcaactatggtgtggataaaaatataaactcgcccattcctgctccaagaaccactgaaggtttaccaaatatgaaactcagctcatatccaactcctaacttattgaatactgctgataatcgacgtgctaacaaaaaaggacgtagggct

SEQ ID NO: 707 - protein, 100 aa, Saccharomyces cerevisiae
MRLLRRNMLVLTLLVCVFSSIISCSIPLSSRTSRRQIVEDEVASTKKLNFNYGVDKNINSPIPAPRTTEGLPNMKLSSYPTPNLLNTADNRRANKKGRRA

SEQ ID NO: 708 - DNA, 300 bp, Saccharomyces cerevisiae
atgcaaactgtgttgaaatatttgttgcttattatgtgtggaagcttttgtgcttcggaggaattgcaaaaccagaccaatgttcctgcaatattcttctcttacaaactaactcccggtattttaaagtatcaagaggattatgatagggctgtgactttaccaagagacacctttattgaagcggctgagaaattcttaggtgtatgtaatgctgacacttatgtgtttattaatcaaccaggcctgaggaaattggacttcttggaatttgaaacagagtttgtttcgttacagaga

SEQ ID NO: 709 - protein, 100 aa, Saccharomyces cerevisiae
MQTVLKYLLLIMCGSFCASEELQNQTNVPAIFFSYKLTPGILKYQEDYDRAVTLPRDTFIEAAEKFLGVCNADTYVFINQPGLRKLDFLEFETEFVSLQR

SEQ ID NO: 710 - DNA, 132 bp, Saccharomyces cerevisiae
atgatgtcttgtctggtaccaacacgttttactttgacccttaacaccgcgtgtcttttgacgagcacctgggggtttgttagggccacatctgtagtcttacctccaagtttaagtaaagcaggccataaa

SEQ ID NO: 711 - protein, 44 aa, Saccharomyces cerevisiae
MMSCLVPTRFTLTLNTACLLTSTWGFVRATSVVLPPSLSKAGHK

SEQ ID NO: 712 - DNA, 138 bp, Saccharomyces cerevisiae
atgctgttagaattgatttcttatgcaggaaccgtttcagggtttctttttttaacactttcaattgcatcgggtttatactacattagtgaacttgttgaagaacacacagaacccacaagacggtttctcacaagg

SEQ ID NO: 713 - protein, 46 aa, Saccharomyces cerevisiae
MLLELISYAGTVSGFLFLTLSIASGLYYISELVEEHTEPTRRFLTR

SEQ ID NO: 714 - DNA, 300 bp, Saccharomyces cerevisiae
atgaaaatgaatctgaaaaggctcgtagttaccttcttctcatgcatcacctttctgctgaaattcactatagccgccgctgaaccaccagagggctttccagagcccttaaatccaacaaacttcaaagaagagctatctaaggggctgcatattattgacttctatagtccatactgtccgcactgcaaacatttagcacctgtttggatggaaacatgggaggagtttaaagaggagagcaaaacactgaacataacattttcacaggttaactgcatcgagagcgccgatttgtgt

SEQ ID NO: 715 - protein, 100 aa, Saccharomyces cerevisiae
MKMNLKRLVVTFFSCITFLLKFTIAAAEPPEGFPEPLNPTNFKEELSKGLHIIDFYSPYCPHCKHLAPVWMETWEEFKEESKTLNITFSQVNCIESADLC

SEQ ID NO: 716 - DNA, 144 bp, Saccharomyces cerevisiae
atgtcgtttgtttccaagcttctctatacagtctctgcattggtgttatttcattctggtttctcaagctatgagtttcatcacttattaaaacttaactcgcttaataatgcacaaggtgcaatcagcaagttacctaaagat

SEQ ID NO: 717 - protein, 48 aa, Saccharomyces cerevisiae
MSFVSKLLYTVSALVLFHSGFSSYEFHHLLKLNSLNNAQGAISKLPKD

SEQ ID NO: 718 - DNA, 300 bp, Saccharomyces cerevisiae
atgctcaggtgtgcggtcaagaagtttgcatattttgccaccttcctcactatcgtcgctaatatttacatctatacttatccatctttccatccagaacagtgttcatggaactgctctaacaagaacgcaccactacagaaagatttgacttttgtggacaaagtgaagaattacttcagtgatgttcgagagcaatggcatggtagccatgcctctgcaggtaacgatgaggatattcatattttggccttcggtgatcctcagattaaaggcatctggccaaagacgccatatgtg

SEQ ID NO: 719 - protein, 100 aa, Saccharomyces cerevisiae
MLRCAVKKFAYFATFLTIVANIYIYTYPSFHPEQCSWNCSNKNAPLQKDLTFVDKVKNYFSDVREQWHGSHASAGNDEDIHILAFGDPQIKGIWPKTPYV

SEQ ID NO: 720 - DNA, 300 bp, Saccharomyces cerevisiae
atgaggcaggtttggttctcttggattgtgggattgttcctatgttttttcaacgtgtcttctgctgcccaatacgagccacctgcgacttgggagaatgttgattataagaggacaatagacgtgtcaaacgcttatatttcagaaacaatcgaaataactatcaaaaacatagcaagcgaacctgcgactgaatacttcacagcctttgagagtggcatcttcagtaaagtttcctttttttcagcctattttaccaacgaggcaacttttttaaatagccaattacttgccaattcg

SEQ ID NO: 721 - protein, 100 aa, Saccharomyces cerevisiae
MRQVWFSWIVGLFLCFFNVSSAAQYEPPATWENVDYKRTIDVSNAYISETIEITIKNIASEPATEYFTAFESGIFSKVSFFSAYFTNEATFLNSQLLANS

SEQ ID NO: 722 - DNA, 126 bp, Saccharomyces cerevisiae
atgattggctccattgggttctttattacttccttggctgtgttgatacgtactgttatggtttatgccaagagagtggtaaacattagactaaagagagcagtagattatgaggataagatcggg

SEQ ID NO: 723 - protein, 42 aa, Saccharomyces cerevisiae
MIGSIGFFITSLAVLIRTVMVYAKRVVNIRLKRAVDYEDKIG

SEQ ID NO: 724 - DNA, 300 bp, Saccharomyces cerevisiae
atgctggagtttccaatatcagttctgctaggatgcctagtagccgtcaaggcacaaaccacgtttccaaacttcgagagcgatgtgctgaacgagcataacaagttcagagcgctacatgttgacacagcgccgctcacctggtccgacactctggccacctatgcgcagaactacgccgaccaatatgattgttcgggtgtcttaacgcattccgatggcccatatggtgagaaccttgcccttggttacacagacacgggagcggtggacgcctggtacggggagataagcaagtat

SEQ ID NO: 725 - protein, 100 aa, Saccharomyces cerevisiae
MLEFPISVLLGCLVAVKAQTTFPNFESDVLNEHNKFRALHVDTAPLTWSDTLATYAQNYADQYDCSGVLTHSDGPYGENLALGYTDTGAVDAWYGEISKY

SEQ ID NO: 726 - DNA, 300 bp, Saccharomyces cerevisiae
atgttacagagtatagtcctttccgtgtgcatgtttatgttgcacacagtcgctgccagtggacctcagtcgtaccaaaagttggatttcactaatgttggttttacaggctcctacgtagatgtgaataagtttaaagatatcaccaacaatgaatcgtgtacttgcgaagtgggtgacagagtatggtttagtggtaagaacgctccactagcagactatttatccgttcatttccgtggaccattgaagttgaaacaatttgctttttacacatcccctggatttaccgtcaacaac

SEQ ID NO: 727 - protein, 100 aa, Saccharomyces cerevisiae
MLQSIVLSVCMFMLHTVAASGPQSYQKLDFTNVGFTGSYVDVNKFKDITNNESCTCEVGDRVWFSGKNAPLADYLSVHFRGPLKLKQFAFYTSPGFTVNN

SEQ ID NO: 728 - DNA, 225 bp, Saccharomyces cerevisiae
atgactggcgaagaatggggcttgactgtactgtcattcttggtaagagtcggattttttctttttggcatttaccaggacgctaatttcaaagtgaggtacactgatatcgactattttgtgtttcatgatgctgctaaatatgtatacgaaggcaaatcaccttatgcaagggatacatatcgttacacaccgctactaagttggctgctagtgcctaatcat

SEQ ID NO: 729 - protein, 75 aa, Saccharomyces cerevisiae
MTGEEWGLTVLSFLVRVGFFLFGIYQDANFKVRYTDIDYFVFHDAAKYVYEGKSPYARDTYRYTPLLSWLLVPNH

SEQ ID NO: 730 - DNA, 132 bp, Saccharomyces cerevisiae
atgagtttatactttacgacattatttttattgctcactgttgaggtggtaatgctcttcatcttcgttttgcctttgccattccggatccgtaggggtatttttagcacctataaccaattgacagcgaag

SEQ ID NO: 731 - protein, 44 aa, Saccharomyces cerevisiae
MSLYFTTLFLLLTVEVVMLFIFVLPLPFRIRRGIFSTYNQLTAK

SEQ ID NO: 732 - DNA, 129 bp, Saccharomyces cerevisiae
atgcgatcttatatgcagattcttcaaaaatttgccaaatttattgggccagggatattagtcagtgtggcttatatggacccaggaaattatgccactagtgtttccggtggtgctcaatacaaatat

SEQ ID NO: 733 - protein, 43 aa, Saccharomyces cerevisiae
MRSYMQILQKFAKFIGPGILVSVAYMDPGNYATSVSGGAQYKY

SEQ ID NO: 734 - DNA, 183 bp, Saccharomyces cerevisiae
atgaagctaggacatcgtgagcaacaattctacttgtggtacttcatcgttcacattcccatcaccatattcatcgactcatcagtggttattcccgctaaatggcaactagggattgcgcaaaaggttgttagtgatcacatcgcaaagcaacacgatttcctgctatcagagaaaccagaa

SEQ ID NO: 735 - protein, 61 aa, Saccharomyces cerevisiae
MKLGHREQQFYLWYFIVHIPITIFIDSSVVIPAKWQLGIAQKVVSDHIAKQHDFLLSEKPE

SEQ ID NO: 736 - DNA, 300 bp, Saccharomyces cerevisiae
atgataacactcttattatacctgtgcgtaatatgtaacgcaatagtgttaataagggctgattcgatagcggacccttggcctgaagcgcgacatctactaaataccatagctaagtccagagacccaatgaaagaagctgctatggaacccaatgcagatgaatttgttggattctatgtaccgatggattattccccacgtaatgaggaaaaaaactaccagagcatttggcaaaacgaaatcacagattctcaacgtcatatttatgaattacttgtacaatcaagtgaacaattc

SEQ ID NO: 737 - protein, 100 aa, Saccharomyces cerevisiae
MITLLLYLCVICNAIVLIRADSIADPWPEARHLLNTIAKSRDPMKEAAMEPNADEFVGFYVPMDYSPRNEEKNYQSIWQNEITDSQRHIYELLVQSSEQF

SEQ ID NO: 738 - DNA, 300 bp, Saccharomyces cerevisiae
atgtccattgtagcactaaagaacgcagtggtgacccttatacagaaagcgaaaggtagtggtggaacctcagagttgggggggtctgaatcaactcccttgttgaggggtagtaatagcaatagttcaaggcatgataacttatcctcatctagctcggatattatctatggtagaaattcagcgcaggatctagaaaactcaccgatgtcagtagggaaagataataggaatggcgataacggttcggataacgaaaaggcgaacctagggttcttccaatcagtagatcctcgcgta

SEQ ID NO: 739 - protein, 100 aa, Saccharomyces cerevisiae
MSIVALKNAVVTLIQKAKGSGGTSELGGSESTPLLRGSNSNSSRHDNLSSSSSDIIYGRNSAQDLENSPMSVGKDNRNGDNGSDNEKANLGFFQSVDPRV

SEQ ID NO: 740 - DNA, 300 bp, Saccharomyces cerevisiae
atgcaggtgttacagttatggttgacaactttgatctctttggtggtggcagtgcagggattacatttcgacattgcagcatctacagatccagaacaggtttgtattcgtgattttgtcactgaaggtcaattggttgtcgcggatattcactcagatggttctgttggtgatggacagaaactaaacctcttcgtgcgtgattcagttggaaacgagtatcgtagaaagagggactttgcaggcgacgttcgtgttgcgtttactgctccatcctccacggcattcgacgtttgtttt

SEQ ID NO: 741 - protein, 100 aa, Saccharomyces cerevisiae
MQVLQLWLTTLISLVVAVQGLHFDIAASTDPEQVCIRDFVTEGQLVVADIHSDGSVGDGQKLNLFVRDSVGNEYRRKRDFAGDVRVAFTAPSSTAFDVCF

SEQ ID NO: 742 - DNA, 300 bp, Saccharomyces cerevisiae
atgcaattcttcaaaacacttgcggccttggtgtcgtgcatatcgttcgtcctcgcttacgtggcacaagatgttcatgtatcattcccctccaccgcaggaaagtctagggtaatgatcggtaaagttgaacccagaataggaatcgatgaaactgttccgactacaatcacagttgaagaccctaacgaggtgattcaagtaaatttcgccattgagtctaccaacaaacccttccagaacaccttattgataggcttacctaataagaacctagaaatggcttttgaacccgaaatt

SEQ ID NO: 743 - protein, 100 aa, Saccharomyces cerevisiae
MQFFKTLAALVSCISFVLAYVAQDVHVSFPSTAGKSRVMIGKVEPRIGIDETVPTTITVEDPNEVIQVNFAIESTNKPFQNTLLIGLPNKNLEMAFEPEI

SEQ ID NO: 744 - DNA, 135 bp, Saccharomyces cerevisiae
atgtcattcaagtttctgatagaatcgctgcttctcggttcgataagcggacaaatacggtgtggtagatcttcggtgatcccccgtggcgatgtatcttatgggggagacgatactgacgaacttaacatggat

SEQ ID NO: 745 - protein, 45 aa, Saccharomyces cerevisiae
MSFKFLIESLLLGSISGQIRCGRSSVIPRGDVSYGGDDTDELNMD

SEQ ID NO: 746 - DNA, 300 bp, Saccharomyces cerevisiae
atgatcgtcaatattagtgcgaagatgatcttatcgatatgctttacgtttctgtcattttttaaagccactcatgccatggatttggatactactagcaaaacgtcaatttgtgatgcgacagcgttaattcaaggtggtatgctggattactatgagggtactagatacggtggtaccgttgggatgtttcagtcaccatactattggtggcatgcaggggaagcatttggtggcatgttggaaaattggtttctttgtgagaatgatacatatcaagaattactatacgatgcacta

SEQ ID NO: 747 - protein, 100 aa, Saccharomyces cerevisiae
MIVNISAKMILSICFTFLSFFKATHAMDLDTTSKTSICDATALIQGGMLDYYEGTRYGGTVGMFQSPYYWWHAGEAFGGMLENWFLCENDTYQELLYDAL

SEQ ID NO: 748 - DNA, 123 bp, Saccharomyces cerevisiae
atgctacaattctcaacatttctagtgctcctatacatctccatatcctatgtgctaccgctatatgcaacttcacaaccagaagggtctaaacgagataatcctcgaacgattaaatctcgc

SEQ ID NO: 749 - protein, 41 aa, Saccharomyces cerevisiae
MLQFSTFLVLLYISISYVLPLYATSQPEGSKRDNPRTIKSR

SEQ ID NO: 750 - DNA, 123 bp, Saccharomyces cerevisiae
atgtctagttcaatatttggcccacttacgggttttttggagcgtgtcaattcactcaatgcgccctaccaagcattatcatatgacgaacaaaaggccatgactatttggcaaagagtcaaa

SEQ ID NO: 751 - protein, 41 aa, Saccharomyces cerevisiae
MSSSIFGPLTGFLERVNSLNAPYQALSYDEQKAMTIWQRVK

SEQ ID NO: 752 - DNA, 183 bp, Saccharomyces cerevisiae
atgcgttggtctgtccttgatacagtgctattgaccgtgatttcctttcatctaatccaagctccattcaccaaggtggaagagagttttaatattcaagccattcatgatattttaacctacagcgtatttgatatctcccaatatgaccacttgaaatttcctggagtagtccctagaaca

SEQ ID NO: 753 - protein, 61 aa, Saccharomyces cerevisiae
MRWSVLDTVLLTVISFHLIQAPFTKVEESFNIQAIHDILTYSVFDISQYDHLKFPGVVPRT

SEQ ID NO: 754 - DNA, 135 bp, Saccharomyces cerevisiae
atggtgccagaaaatagaaggaaacagttggcaatttttgtagttgtcacatatttgctcacattttattgcgtgtattcagccaccaagacaagcgtttcctttttgcaagtaacactgaagctaaatgaaggc

SEQ ID NO: 755 - protein, 45 aa, Saccharomyces cerevisiae
MVPENRRKQLAIFVVVTYLLTFYCVYSATKTSVSFLQVTLKLNEG

SEQ ID NO: 756 - DNA, 300 bp, Saccharomyces cerevisiae
atgcgcgtttttactttgattgcgattttgtttagttcatctttgttaacacatgcattctcctctaattatgctcctgtaggcatatcattacctgcttttaccaaagaatgtctttactatgatttatcctctgataaagatgtccttgtggtcagttaccaagttttgacaggtgggaatttcgagatagacttcgatattaccgcccctgatggctctgttatcgtcactgaaagacaaaagaagcattctgattttctactgaagtcgtttggtataggtaagtacactttctgt

SEQ ID NO: 757 - protein, 100 aa, Saccharomyces cerevisiae
MRVFTLIAILFSSSLLTHAFSSNYAPVGISLPAFTKECLYYDLSSDKDVLVVSYQVLTGGNFEIDFDITAPDGSVIVTERQKKHSDFLLKSFGIGKYTFC

SEQ ID NO: 758 - DNA, 300 bp, Saccharomyces cerevisiae
atgaattggctgtttttggtctcgctggttttcttctgcggcgtgtcaacccatcctgccctggcaatgtccagcaacagactactaaagctggctaataaatctcccaagaaaattatacctctgaaggactcaagttttgaaaacatcttggcaccacctcacgaaaatgcctatatagttgctctgtttactgccacagcgcccgaaattggctgttctctgtgtctcgagctagaatccgaatacgacaccatagtggcctcctggtttgatgatcatccggatgcaaaatcgtcc

SEQ ID NO: 759 - protein, 100 aa, Saccharomyces cerevisiae
MNWLFLVSLVFFCGVSTHPALAMSSNRLLKLANKSPKKIIPLKDSSFENILAPPHENAYIVALFTATAPEIGCSLCLELESEYDTIVASWFDDHPDAKSS

SEQ ID NO: 760 - DNA, 102 bp, Saccharomyces cerevisiae
atgagaccacgtgaccaaggctttttggttttagggtttacttactcggtactcctaattagtcttgctacattttactggttacgcaacaatgactctttc

SEQ ID NO: 761 - protein, 34 aa, Saccharomyces cerevisiae
MRPRDQGFLVLGFTYSVLLISLATFYWLRNNDSF

SEQ ID NO: 762 - DNA, 300 bp, Saccharomyces cerevisiae
atgatattacttcattttgtctattctctttgggccttacttctcattcctttaactaatgccgaagaattcacccccaaagtgacaaagactatcgcgcaagattcatttgatatattaagctttgatgattccaacactttaattagaaaacaagacacctccgttactataagctttgacgatggtgaaacatgggaaaaagttgaaggcattgaaggcgaaatcacttggatatacatcgaccccttcaatagacatgacagagccgttgcaacggcaatgaatgggtcgtacctt

SEQ ID NO: 763 - protein, 100 aa, Saccharomyces cerevisiae
MILLHFVYSLWALLLIPLTNAEEFTPKVTKTIAQDSFDILSFDDSNTLIRKQDTSVTISFDDGETWEKVEGIEGEITWIYIDPFNRHDRAVATAMNGSYL

SEQ ID NO: 764 - DNA, 264 bp, Saccharomyces cerevisiae
atgaaactgaaaactgtaagatctgcggtcctttcgtcactctttgcatcgcaggttctcggtaagataataccagcagcaaacaagcgcgacgacgactcgaattccaagttcgtcaagttgccctttcataagctttacggggactcgctagaaaatgtgggaagcgacaaaaaaccggaagtacgcctattgaagagggctgacggttatgaagaaattataattaccaaccagcaaagtttctattcggtggacttggaa

SEQ ID NO: 765 - protein, 88 aa, Saccharomyces cerevisiae
MKLKTVRSAVLSSLFASQVLGKIIPAANKRDDDSNSKFVKLPFHKLYGDSLENVGSDKKPEVRLLKRADGYEEIIITNQQSFYSVDLE

SEQ ID NO: 766 - DNA, 216 bp, Saccharomyces cerevisiae
atgaggtttctttcaaaaaggatactgaaacctgtactttcagtgatcattctaatatcgattgccgtaaccgttgttctttactttttaacggcgaatgagaactatttgcaagcagtcaaggatagtgccaagtcccagtatgcttctctccgggagagctacaaaagtattacaggtaaaactgaaagcgctgatgaacttcctgatcatgat

SEQ ID NO: 767 - protein, 72 aa, Saccharomyces cerevisiae
MRFLSKRILKPVLSVIILISIAVTVVLYFLTANENYLQAVKDSAKSQYASLRESYKSITGKTESADELPDHD

SEQ ID NO: 768 - DNA, 261 bp, Saccharomyces cerevisiae
atgtctgtgcaccacaaaaagaagctaatgcccaaatcggcattgctgattagaaaataccaaaagggaatcagatcatcattcattgggctcatcatagtgttatcctttttatttttcatgagtggctcaaggtccccagaggtaccaatagctcagggcaccagtgtcagtcgtgtagccagtaaggattatttgatgccgtttactgacaagtcacaaggagtaatccatcccgtggacgatggaaagaaggaaaag

SEQ ID NO: 769 - protein, 87 aa, Saccharomyces cerevisiae
MSVHHKKKLMPKSALLIRKYQKGIRSSFIGLIIVLSFLFFMSGSRSPEVPIAQGTSVSRVASKDYLMPFTDKSQGVIHPVDDGKKEK

SEQ ID NO: 770 - DNA, 180 bp, Saccharomyces cerevisiae
atggcacacatcccagaggttttacccaaatcaataccgattccggcatttattgttaccacctcatcgtacctatggtactacttcaatctggtgttgactcaaatcccgggaggccaattcatcgtttcgtacatcaagaaatcgcatcatgacgatccatacaggaccacggttgag

SEQ ID NO: 771 - protein, 60 aa, Saccharomyces cerevisiae
MAHIPEVLPKSIPIPAFIVTTSSYLWYYFNLVLTQIPGGQFIVSYIKKSHHDDPYRTTVE

SEQ ID NO: 772 - DNA, 207 bp, Saccharomyces cerevisiae
atgaataaactattgttacatctagtacgagtcatttcgatactcggcctagcaaacgctctcacacaaacgcaaccgattttaaaagatattcaaataacagatagttataccaaaacaaaagaatgtacggatccagatcattggttcataatagaagggcaactgtctattccaaagggaagtcagcaaaatataacattccaa

SEQ ID NO: 773 - protein, 69 aa, Saccharomyces cerevisiae
MNKLLLHLVRVISILGLANALTQTQPILKDIQITDSYTKTKECTDPDHWFIIEGQLSIPKGSQQNITFQ

SEQ ID NO: 774 - DNA, 153 bp, Saccharomyces cerevisiae
atgtccgtttccaagattgctttcgttttaagtgccattgcctctttggccgtcgctgacaccagcgccgccgaaactgctgaattgcaagctattatcggtgacatcaactctcatctttctgactacttgggtctagaaactggcaacagt

SEQ ID NO: 775 - protein, 51 aa, Saccharomyces cerevisiae
MSVSKIAFVLSAIASLAVADTSAAETAELQAIIGDINSHLSDYLGLETGNS

SEQ ID NO: 776 - DNA, 153 bp, Saccharomyces cerevisiae
atgcgtctctctaacctaattgcttctgcctctcttttatctgctgctactcttgctgctcccgctaaccacgaacacaaggacaagcgtgctgtggtcactaccactgttcaaaaacaaaccactatcattgttaatggtgccgcttcaact

SEQ ID NO: 777 - protein, 51 aa, Saccharomyces cerevisiae
MRLSNLIASASLLSAATLAAPANHEHKDKRAVVTTTVQKQTTIIVNGAAST

SEQ ID NO: 778 - DNA, 195 bp, Saccharomyces cerevisiae
atgcaattcaaaaacgtcgccctagctgcctccgttgctgctctatccgccactgcttctgctgaaggttacactccaggtgaaccatggtccaccttaaccccaaccggctccatctcttgtggtgctgccgaatacactaccacctttggtattgctgttcaagctattacctcttcaaaagctaagagagac

SEQ ID NO: 779 - protein, 65 aa, Saccharomyces cerevisiae
MQFKNVALAASVAALSATASAEGYTPGEPWSTLTPTGSISCGAAEYTTTFGIAVQAITSSKAKRD

SEQ ID NO: 780 - DNA, 300 bp, Saccharomyces cerevisiae
atgaagttctcttctgttactgctattactctagccaccgttgccaccgttgccactgctaagaagggtgaacatgatttcactaccactttaactttgtcatcggacggtagtttaactactaccacctctactcataccactcacaagtatggtaagttcaacaagacttccaagtccaagaccccaaaccacactggtactcacaagtacggtaagttcaacaagacctccaagtctaagaccccaaaccataccggtactcacaagtatggtaagttcaacaagacttccaagtcc

SEQ ID NO: 781 - protein, 100 aa, Saccharomyces cerevisiae
MKFSSVTAITLATVATVATAKKGEHDFTTTLTLSSDGSLTTTTSTHTTHKYGKFNKTSKSKTPNHTGTHKYGKFNKTSKSKTPNHTGTHKYGKFNKTSKS

SEQ ID NO: 782 - DNA, 225 bp, Saccharomyces cerevisiae
atggctagcttgaaggtatttctcgcagtttacttgcttggcggtatcacatttttgcctttggtccttttcaccctctataaaatccatttattgtacagtaaccttaaatcggcatcgaagaaggagctagatcatgatacagcagacgaaattgatgagaaaaccagacttctggctcgcgatatagacccagagtttaaagcacgcaagctagaagagcaa

SEQ ID NO: 783 - protein, 75 aa, Saccharomyces cerevisiae
MASLKVFLAVYLLGGITFLPLVLFTLYKIHLLYSNLKSASKKELDHDTADEIDEKTRLLARDIDPEFKARKLEEQ

SEQ ID NO: 784 - DNA, 195 bp, Saccharomyces cerevisiae
atgtttaaatctgttgtttattcaattttagccgcttctttggccaatgcaggtaccattcccttaggcaaactagccgatgtcgacaagattggtacccaaaaagatatcttcccatttttgggtggtgccggaccatactactctttccctggcgactatggtatttctcgtgatttgcctgaaggttgtgaa

SEQ ID NO: 785 - protein, 65 aa, Saccharomyces cerevisiae
MFKSVVYSILAASLANAGTIPLGKLADVDKIGTQKDIFPFLGGAGPYYSFPGDYGISRDLPEGCE

SEQ ID NO: 786 - DNA, 300 bp, Saccharomyces cerevisiae
atgaactcatttgcgtcattaggtctgatatattcagtagtaaaccttttaactagagtagaggctcaaattgtgttctaccagaatagtagtacttcactgcctgtccctactttagtatccacctcaatagcagattttcacgagtcctcatcaactggcgaagtgcagtattcatcctcttattcgtatgtgcagccctcaatagactccttcacttcatctagcttcttaacaagttttgaagctcctaccgaaacttcttccagctatgcagtttcttcctcattgataacttct

SEQ ID NO: 787 - protein, 100 aa, Saccharomyces cerevisiae
MNSFASLGLIYSVVNLLTRVEAQIVFYQNSSTSLPVPTLVSTSIADFHESSSTGEVQYSSSYSYVQPSIDSFTSSSFLTSFEAPTETSSSYAVSSSLITS

SEQ ID NO: 788 - DNA, 177 bp, Saccharomyces cerevisiae
atgaaattgtcttccgcttttgtattatctgctatcaccgttgccgctttaggcgaaagtattactactacgataactgctaccaaaaatgggcatgtttacaccaagactgtcactcaagatgctacttttgtctgggcaggagaaggcgctgcggtaacctccgcagtaactgaa

SEQ ID NO: 789 - protein, 59 aa, Saccharomyces cerevisiae
MKLSSAFVLSAITVAALGESITTTITATKNGHVYTKTVTQDATFVWAGEGAAVTSAVTE

SEQ ID NO: 790 - DNA, 168 bp, Saccharomyces cerevisiae
atggcttacactaagatcgctttattcgctgctattgctgctttggcttccgctcaaacccaagatcaaattaacgaattgaacgttattttgaacgatgtcaaatctcacttgcaagagtacattagcttagcttctgattcttcctctggattttccttaagcagt

SEQ ID NO: 791 - protein, 56 aa, Saccharomyces cerevisiae
MAYTKIALFAAIAALASAQTQDQINELNVILNDVKSHLQEYISLASDSSSGFSLSS

SEQ ID NO: 792 - DNA, 153 bp, Saccharomyces cerevisiae
atgatttcacccataagctttctatcatcgctgctatgcttaacttatctaacctcagctttaccgattcttcctaagagagaagttgtaacgagagttcacacagcaagcacaactaatgttgtgactgatttttactccactactaccgaa

SEQ ID NO: 793 - protein, 51 aa, Saccharomyces cerevisiae
MISPISFLSSLLCLTYLTSALPILPKREVVTRVHTASTTNVVTDFYSTTTE

SEQ ID NO: 794 - DNA, 150 bp, Saccharomyces cerevisiae
atgcagttacttcgctgtttttcaatattttctgttattgcttcagttttagcacaggaactgacaactatatgcgagcaaatcccctcaccaactttagaatcgacgccgtactctttgtcaacgactactattttggccaacgggaag

SEQ ID NO: 795 - protein, 50 aa, Saccharomyces cerevisiae
MQLLRCFSIFSVIASVLAQELTTICEQIPSPTLESTPYSLSTTTILANGK

SEQ ID NO: 796 - DNA, 219 bp, Saccharomyces cerevisiae
atgcgtttctctactacactcgctactgcagctactgcgctatttttcacagcctcccaagtttcagctattggtgaactagcctttaacttgggtgtcaagaacaacgatggtacttgtaagtccacttccgactatgaaaccgaattacaagctttgaagagctacacttccaccgtcaaagtttacgctgcctcagattgtaacactttgcaaaac

SEQ ID NO: 797 - protein, 73 aa, Saccharomyces cerevisiae
MRFSTTLATAATALFFTASQVSAIGELAFNLGVKNNDGTCKSTSDYETELQALKSYTSTVKVYAASDCNTLQN

SEQ ID NO: 798 - DNA, 153 bp, Saccharomyces cerevisiae
atgaaatttaatttttctacaattttcaatatcttattctttttattcaccttaattgaagccaacagcaatggggaaacagtcaaacttattacttctgatggtattgtttacagttatgctgtctacacaaagactcttgcgccggcaagg

SEQ ID NO: 799 - protein, 51 aa, Saccharomyces cerevisiae
MKFNFSTIFNILFFLFTLIEANSNGETVKLITSDGIVYSYAVYTKTLAPAR

SEQ ID NO: 800 - DNA, 267 bp, Saccharomyces cerevisiae
atgcaaagaccatttctactcgcttatttggtcctttcgcttctatttaactcggctttgggttttccaactgcactagttccaagaggatcctccgaaggaactagctgtaattctatcgttaatggctgtcccaacttagacttcaattggcacatggaccagcaaaatatcatgcagtatactttggatgtgacttccgtttcttgggttcaagacaacacataccaaatcactattcatgtcaaaggtaaagaaaatattgac

SEQ ID NO: 801 - protein, 89 aa, Saccharomyces cerevisiae
MQRPFLLAYLVLSLLFNSALGFPTALVPRGSSEGTSCNSIVNGCPNLDFNWHMDQQNIMQYTLDVTSVSWVQDNTYQITIHVKGKENID

SEQ ID NO: 802 - DNA, 183 bp, Saccharomyces cerevisiae
atgcaatacaaaaagactttggttgcctctgctttggccgctactacattggccgcctatgctccatctgagccttggtccactttgactccaacagccacttacagcggtggtgttaccgactacgcttccaccttcggtattgccgttcaaccaatctccactacatccagcgcatcatct

SEQ ID NO: 803 - protein, 61 aa, Saccharomyces cerevisiae
MQYKKTLVASALAATTLAAYAPSEPWSTLTPTATYSGGVTDYASTFGIAVQPISTTSSASS

SEQ ID NO: 804 - DNA, 201 bp, Saccharomyces cerevisiae
atgcaatataaaaagccattagtcgtctccgctttagctgctacatctttagctgcctatgctccaaaggacccgtggtccactttaactccatcagctacttacaagggtggtataacagattactcttcgagtttcggtattgctattgaagccgtggctaccagtgcttcctccgtcgcctcatctaaagcaaagaga

SEQ ID NO: 805 - protein, 67 aa, Saccharomyces cerevisiae
MQYKKPLVVSALAATSLAAYAPKDPWSTLTPSATYKGGITDYSSSFGIAIEAVATSASSVASSKAKR

SEQ ID NO: 806 - DNA, 180 bp, Saccharomyces cerevisiae
atgcaatacaaaaaatcattagttgcctccgccttagttgctacatctttagctgcctatgctccaaaggacccgtggtccactttaactccatcagctacttacaagggtggtataactgattactcttctactttcggtattgctgttgaaccaattgccactactgcttcctccaag

SEQ ID NO: 807 - protein, 60 aa, Saccharomyces cerevisiae
MQYKKSLVASALVATSLAAYAPKDPWSTLTPSATYKGGITDYSSTFGIAVEPIATTASSK

SEQ ID NO: 808 - DNA, 195 bp, Saccharomyces cerevisiae
atgagatctttaaatacccttttactttctctctttgtcgcaatgtccagtggtgctccactactaaaaattcgtgaagagaagaattcttctttgccatcaatcaaaatttttggtaccggcggtactatcgcttccaagggttcgacaagtgcaacaacggcgggttatagcgtgggattaaccgtaaatgat

SEQ ID NO: 809 - protein, 65 aa, Saccharomyces cerevisiae
MRSLNTLLLSLFVAMSSGAPLLKIREEKNSSLPSIKIFGTGGTIASKGSTSATTAGYSVGLTVND

SEQ ID NO: 810 - DNA, 171 bp, Saccharomyces cerevisiae
atgcgtgccaccactttattatcttcagtcgtttctttggcattgttgtcgaaggaagtcttagcaacacctccagcttgtttattggcctgtgttgcgcaagtcggcaaatcctcttccacatgtgactctttgaatcaagtcacctgttactgtgaacacgaaaactcc

SEQ ID NO: 811 - protein, 57 aa, Saccharomyces cerevisiae
MRATTLLSSVVSLALLSKEVLATPPACLLACVAQVGKSSSTCDSLNQVTCYCEHENS

SEQ ID NO: 812 - DNA, 153 bp, Saccharomyces cerevisiae
atgcgtttttcaaatttcctaactgtatctgcattattaaccggagctctaggagctcctgctgttcgccataaacatgaaaagcgtgacgttgttactgccacagtccatgcgcaggttactgttgtcgtttccggtaacagcggcgaaact

SEQ ID NO: 813 - protein, 51 aa, Saccharomyces cerevisiae
MRFSNFLTVSALLTGALGAPAVRHKHEKRDVVTATVHAQVTVVVSGNSGET

SEQ ID NO: 814 - DNA, 300 bp, Saccharomyces cerevisiae
atgaaactgtccgccaccactcttaccgcggcttcattgatcggttatagcacaatcgtttccgctttgccgtatgcggctgatattgacacaggatgtactactactgctcatggttcacaccagcataagagggccgttgcagttacatacgtttacgaaacagtcactgtcgataaaaatggtcagaccgtcactccaacctcaactgaagcctcttctacagttgcttccactactactctgatttccgaatcttcggtcaccaagtcttcttccaaagttgcttcttcttctgag

SEQ ID NO: 815 - protein, 100 aa, Saccharomyces cerevisiae
MKLSATTLTAASLIGYSTIVSALPYAADIDTGCTTTAHGSHQHKRAVAVTYVYETVTVDKNGQTVTPTSTEASSTVASTTTLISESSVTKSSSKVASSSE

SEQ ID NO: 816 - DNA, 195 bp, Saccharomyces cerevisiae
atggtgagaaatcgttttataagaaaaatgaaaaaaaacttgtttaaatcaaatcacttatcatatttgaagagtaaatggaaagtaaagatcactggacaaataaaaatggattttgataatttactaaacctagaagaacagtattaccaagaaggttttctggagggccagaatgagaatataaagcagagc

SEQ ID NO: 817 - protein, 65 aa, Saccharomyces cerevisiae
MVRNRFIRKMKKNLFKSNHLSYLKSKWKVKITGQIKMDFDNLLNLEEQYYQEGFLEGQNENIKQS

SEQ ID NO: 818 - DNA, 159 bp, Saccharomyces cerevisiae
atgcaattatatctgacacttctttttctattaagtttcgtcgaatgttcatatataagtttcatatcgaataatgcagacgaaatattggaaactgatttaattgaaactttatcttacgctactttgacagtaggtgagccttatgttgcacaatcg

SEQ ID NO: 819 - protein, 53 aa, Saccharomyces cerevisiae
MQLYLTLLFLLSFVECSYISFISNNADEILETDLIETLSYATLTVGEPYVAQS

SEQ ID NO: 820 - DNA, 150 bp, Saccharomyces cerevisiae
atggcttacatcaagatcgctttattagctgctatcgctgctttggcttctgcccaaactcaggaagaaattgacgaattgaacgttattttgaatgacgttaagtccaacttgcaagaatatattagtttggctgaagattcttcatct

SEQ ID NO: 821 - protein, 50 aa, Saccharomyces cerevisiae
MAYIKIALLAAIAALASAQTQEEIDELNVILNDVKSNLQEYISLAEDSSS

SEQ ID NO: 822 - DNA, 195 bp, Saccharomyces cerevisiae
atgttgaagtcagccgtttattcaattttagccgcttctttggttaatgcaggtaccatacccctcggaaagttatctgacattgacaaaatcggaactcaaacggaaattttcccatttttgggtggttctgggccatactactctttccctggtgattatggtatttctcgtgatttgccggaaagttgtgaa

SEQ ID NO: 823 - protein, 65 aa, Saccharomyces cerevisiae
MLKSAVYSILAASLVNAGTIPLGKLSDIDKIGTQTEIFPFLGGSGPYYSFPGDYGISRDLPESCE

SEQ ID NO: 824 - DNA, 195 bp, Saccharomyces cerevisiae
atgtttaagtctgttgtttattcggttctagccgctgctttagttaatgcaggtacaattcccctcggagagttagccgatgttgccaaaattggcactcaggaagacatattcccattcctgggtggtgccgggccatacttctctttccctggcgactatggtatttctcgtgacttgcctgaaggttgtgaa

SEQ ID NO: 825 - protein, 65 aa, Saccharomyces cerevisiae
MFKSVVYSVLAAALVNAGTIPLGELADVAKIGTQEDIFPFLGGAGPYFSFPGDYGISRDLPEGCE

SEQ ID NO: 826 - DNA, 186 bp, Saccharomyces cerevisiae
atggtcaaactaacttcaatcgctgctggtgttgccgccatcgctgctactgcttccgcaaccaccactctagctcaatctgacgaaagagtcaacttggttgaattgggtgtctacgtctctgatatcagagctcacttggcccaatactactctttccaagtcgctcatccaactgaaacctac

SEQ ID NO: 827 - protein, 62 aa, Saccharomyces cerevisiae
MVKLTSIAAGVAAIAATASATTTLAQSDERVNLVELGVYVSDIRAHLAQYYSFQVAHPTETY

SEQ ID NO: 828 - DNA, 108 bp, Saccharomyces cerevisiae
atgcaaccatctaccgctaccgccgctccaaaagaaaagaccagcagtgaaaagaaggacaactatattatcaaaggtgtcttctgggacccagcatgtgttattgct

SEQ ID NO: 829 - protein, 36 aa, Saccharomyces cerevisiae
MQPSTATAAPKEKTSSEKKDNYIIKGVFWDPACVIA

SEQ ID NO: 830 - DNA, 222 bp, Saccharomyces cerevisiae
atgagcttacccgatggattttatataaggcgaatggaagagggggatttggaacaggtcactgagacgctaaaggttttgaccaccgtgggcactattacccccgaatccttcagcaaactcataaaatactggaatgaagccacagtatggaatgataacgaagataaaaaaataatgcaatataaccccatggtgattgtggacaagcgcaccgagacg

SEQ ID NO: 831 - protein, 74 aa, Saccharomyces cerevisiae
MSLPDGFYIRRMEEGDLEQVTETLKVLTTVGTITPESFSKLIKYWNEATVWNDNEDKKIMQYNPMVIVDKRTET

SEQ ID NO: 832 - DNA, 228 bp, Saccharomyces cerevisiae
atgaaattcatttctacctttctcacttttattttagcggccgtttctgtcactgctagttccgatgaagatatcgctcaggtgccagccgaggccattattggatacttggatttcggaggtgatcatgacatagcttttttaccattcagtaacgctaccgccagtgggctattgtttatcaacaccactattgctgaggcggctgaaaaagagcaaaacaccact

SEQ ID NO: 833 - protein, 76 aa, Saccharomyces cerevisiae
MKFISTFLTFILAAVSVTASSDEDIAQVPAEAIIGYLDFGGDHDIAFLPFSNATASGLLFINTTIAEAAEKEQNTT

SEQ ID NO: 834 - DNA, 150 bp, Saccharomyces cerevisiae
atgtctgcaattaatcatctttgtttgaaacttattttggcgagtttcgcgattattaacaccattactgctttaacaaacgatggcactggtcacttagaattccttttacaacacgaagaggagatgtattacgcaacaaccttagat

SEQ ID NO: 835 - protein, 50 aa, Saccharomyces cerevisiae
MSAINHLCLKLILASFAIINTITALTNDGTGHLEFLLQHEEEMYYATTLD

SEQ ID NO: 836 - DNA, 198 bp, Saccharomyces cerevisiae
atgcttttgcaagctttccttttccttttggctggttttgcagccaaaatatctgcatcaatgacaaacgaaactagcgatagacctttggtccacttcacacccaacaagggctggatgaatgacccaaatgggttgtggtacgatgaaaaagatgccaaatggcatctgtactttcaatacaacccaaatgacacc

SEQ ID NO: 837 - protein, 66 aa, Saccharomyces cerevisiae
MLLQAFLFLLAGFAAKISASMTNETSDRPLVHFTPNKGWMNDPNGLWYDEKDAKWHLYFQYNPNDT

SEQ ID NO: 838 - DNA, 219 bp, Saccharomyces cerevisiae
atgcgtttacaaagaaattccatcatatgtgctttggtgtttttagtctcatttgtgctgggagatgtgaatattgtttcccccagctccaaggcaacattcagtccaagtggtggtactgtctctgttcccgttgaatggatggataatggggcatatccctcgttaagcaagatttcaactttcacgttcagtctttgtactggtcctaataacaac

SEQ ID NO: 839 - protein, 73 aa, Saccharomyces cerevisiae
MRLQRNSIICALVFLVSFVLGDVNIVSPSSKATFSPSGGTVSVPVEWMDNGAYPSLSKISTFTFSLCTGPNNN

SEQ ID NO: 840 - DNA, 207 bp, Saccharomyces cerevisiae
atggcacaagatatagataaactagcccgtgatgaggaaaagcccgtaaaacttagcagctctccccttaaatttactttgaaatcgactcaaccactgctgtcgtatccagaatcgcccatccacagaagttctattgaaattgaaacgaattacgatgacgaagatgaagaggaagaagatgcatacacatgtttaacacagtca

SEQ ID NO: 841 - protein, 69 aa, Saccharomyces cerevisiae
MAQDIDKLARDEEKPVKLSSSPLKFTLKSTQPLLSYPESPIHRSSIEIETNYDDEDEEEEDAYTCLTQS

SEQ ID NO: 842 - DNA, 192 bp, Saccharomyces cerevisiae
atgtctagaattagtatattagctgtcgccgcagcattagtggcaagtgcaaccgccgcatccgtgaccaccactctatccccttatgatgaaagggtcaatttgattgaattggctgtttacgtttctgatattggcgcccatttatctgaatattacgctttccaggctttgcataagactgaaacatac

SEQ ID NO: 843 - protein, 64 aa, Saccharomyces cerevisiae
MSRISILAVAAALVASATAASVTTTLSPYDERVNLIELAVYVSDIGAHLSEYYAFQALHKTETY

SEQ ID NO: 844 - DNA, 201 bp, Saccharomyces cerevisiae
atggttaatataagcatcgtagcaggaattgtagccttagctactagtgcggctgctattacagcgaccactactttatctccttacgatgaaagagtcaaccttattgaattggctgtttatgtttctgacatcagagcccacatatttcagtactactctttccggaatcaccataagactgaaacatatccttcggaa

SEQ ID NO: 845 - protein, 67 aa, Saccharomyces cerevisiae
MVNISIVAGIVALATSAAAITATTTLSPYDERVNLIELAVYVSDIRAHIFQYYSFRNHHKTETYPSE

SEQ ID NO: 846 - DNA, 195 bp, Saccharomyces cerevisiae
atggtcaaactaacttcaattgttgctggtgtcgctgctattgctgctggtgtcgctgctgccccagccaccactactttatctccctctgacgaaagagttaacctggtcgaattaggtgtctacgtctcagatatcagagctcatttggctgaatactatatgttccaagctgctcatccaactgaaacttac

SEQ ID NO: 847 - protein, 65 aa, Saccharomyces cerevisiae
MVKLTSIVAGVAAIAAGVAAAPATTTLSPSDERVNLVELGVYVSDIRAHLAEYYMFQAAHPTETY

SEQ ID NO: 848 - DNA, 114 bp, Saccharomyces cerevisiae
atgcaaccgatcaccactgcttccacacaagccactcagaaggataaatcctctgaaaagaaagacaactatataatcaagggcctcttctgggatcccgcctgtgttatcgct

SEQ ID NO: 849 - protein, 38 aa, Saccharomyces cerevisiae
MQPITTASTQATQKDKSSEKKDNYIIKGLFWDPACVIA

SEQ ID NO: 850 - DNA, 219 bp, Saccharomyces cerevisiae
atgaagttccaagttgttttatctgcccttttggcatgttcatctgccgtcgtcgcaagcccaatcgaaaacctattcaaatacagggctgttaaggcatctcacagtaagaatatcaactccactttgccggcctggaatgggtctaactctagcaatgttacctacgctaatggaacaaacagtactaccaatactactactgccgaaagcagtcaa

SEQ ID NO: 851 - protein, 73 aa, Saccharomyces cerevisiae
MKFQVVLSALLACSSAVVASPIENLFKYRAVKASHSKNINSTLPAWNGSNSSNVTYANGTNSTTNTTTAESSQ

SEQ ID NO: 852 - DNA, 189 bp, Saccharomyces cerevisiae
atgttactacgttctcttacaagtgccttcgttttaagtgctggtttggctcaggctgctagcagcagtaacagttccacaccatccattgaaattaaaggcaatgcattttttaattcggaatcaggtgaaaggttttatatccgtggtgttgattaccagcctggtggttcttctaacttgactgat

SEQ ID NO: 853 - protein, 63 aa, Saccharomyces cerevisiae
MLLRSLTSAFVLSAGLAQAASSSNSSTPSIEIKGNAFFNSESGERFYIRGVDYQPGGSSNLTD

SEQ ID NO: 854 - DNA, 183 bp, Saccharomyces cerevisiae
atgagatttccttcaatttttactgcagttttattcgcagcatcctccgcattagctgctccagtcaacactacaacagaagatgaaacggcacaaattccggctgaagctgtcatcggttacttagatttagaaggggatttcgatgttgctgttttgccattttccaacagcacaaataac

SEQ ID NO: 855 - protein, 61 aa, Saccharomyces cerevisiae
MRFPSIFTAVLFAASSALAAPVNTTTEDETAQIPAEAVIGYLDLEGDFDVAVLPFSNSTNN

SEQ ID NO: 856 - DNA, 237 bp, Saccharomyces cerevisiae
atgttgaatagttcaagaaaatatgcttgtcgttccctattcagacaagcgaacgtctcaataaaaggactcttttataatggaggcgcatatcgaagagggttttcaacgggatgttgtttgaggagtgataacaaggaaagcccaagtgcaagacaaccactagataggctacaactaggtgatgaaatcaatgaaccagagcctattagaaccaggttttttcaattttccaga

SEQ ID NO: 857 - protein, 79 aa, Saccharomyces cerevisiae
MLNSSRKYACRSLFRQANVSIKGLFYNGGAYRRGFSTGCCLRSDNKESPSARQPLDRLQLGDEINEPEPIRTRFFQFSR

SEQ ID NO: 858 - DNA, 210 bp, Saccharomyces cerevisiae
atgggtgtttgcactatttttaggtggctctttgctgcttacttgctctcttcatataagtcgcttcctggggcatattttgttaggttttattattatgttattcaaaacttgttcttgcctatgtttacagggtttgaaaccgagaatattaagaaacttgagaaaaatgaatatggctgtttctcgtacaccagcctagatacctat

SEQ ID NO: 859 - protein, 70 aa, Saccharomyces cerevisiae
MGVCTIFRWLFAAYLLSSYKSLPGAYFVRFYYYVIQNLFLPMFTGFETENIKKLEKNEYGCFSYTSLDTY

SEQ ID NO: 860 - DNA, 201 bp, Saccharomyces cerevisiae
atggtccttttgaaatggctcgtatgccaattggtcttctttaccgctttttcgcatgcgtttaccgactatctattaaagaagtgtgcgcaatctgggttttgccatagaaacagggtttatgcagaaaatattgccaaatctcatcactgctattacaaagtggacgccgagtctattgcacacgatcctttagagaat

SEQ ID NO: 861 - protein, 67 aa, Saccharomyces cerevisiae
MVLLKWLVCQLVFFTAFSHAFTDYLLKKCAQSGFCHRNRVYAENIAKSHHCYYKVDAESIAHDPLEN

SEQ ID NO: 862 - DNA, 225 bp, Saccharomyces cerevisiae
atgtggttgaaatccttgctgctctgcctgtactccttagtactctgccaagtccacgctgcaccttcatcagggaagcagattacctccaaggatgttgatcttcagaaaaaatatgagcccagtccccccgccacacatcgtggaataatcactatcgaatactttgatcccgtttcgaagtcgatgaaagaggcggatctgacttttgagttgtacggtact

SEQ ID NO: 863 - protein, 75 aa, Saccharomyces cerevisiae
MWLKSLLLCLYSLVLCQVHAAPSSGKQITSKDVDLQKKYEPSPPATHRGIITIEYFDPVSKSMKEADLTFELYGT

SEQ ID NO: 864 - DNA, 150 bp, Saccharomyces cerevisiae
atgagtgtgataggtaggttcttgtattacttgaggtccgtgttggtcgtactggcgcttgcaggctgtggcttttacggtgtaatcgcctctatcctttgcacgttaatcggtaagcaacatttggctcagtggattactgcgcgttgt

SEQ ID NO: 865 - protein, 50 aa, Saccharomyces cerevisiae
MSVIGRFLYYLRSVLVVLALAGCGFYGVIASILCTLIGKQHLAQWITARC

SEQ ID NO: 866 - DNA, 210 bp, Saccharomyces cerevisiae
atgccaagagtagctatcatcatttacacactatatggtcacgttgctgccaccgcagaggcagaaaagaagggaattgaagccgctggaggctctgcagacatttatcaagtcgaggaaacgttgtctccagaagttgttaaggcgcttggcggtgctccaaagccagattacccaattgccactcaagatacgttgacagaatatgat

SEQ ID NO: 867 - protein, 70 aa, Saccharomyces cerevisiae
MPRVAIIIYTLYGHVAATAEAEKKGIEAAGGSADIYQVEETLSPEVVKALGGAPKPDYPIATQDTLTEYD

SEQ ID NO: 868 - DNA, 171 bp, Saccharomyces cerevisiae
atgctggtagtgggattgacaggtgggatcgcttgtggtaagagcacagtgtcgagaagactcagagacaaatacaaactacccattgttgatgcggacaagattgctagacaagtggtcgaaccaggacagaatgcttatgatcaaattgtgttatacttcaaggacaaa

SEQ ID NO: 869 - protein, 57 aa, Saccharomyces cerevisiae
MLVVGLTGGIACGKSTVSRRLRDKYKLPIVDADKIARQVVEPGQNAYDQIVLYFKDK

SEQ ID NO: 870 - DNA, 231 bp, Saccharomyces cerevisiae
atggtgagcatgttctcattatttctgctattaattgagcaatcgccgcttgtagcgtcattgcaacaaagtcaacggcatatagtgggtgttccctgggaaaagcagcacttgtatgactcgaatgaaccagatttgactaaatggcactgtttgaaccacgaagatatcgtattggatataagccagattaatgatggggtttgtgattgtcctgatggttcagatgag

SEQ ID NO: 871 - protein, 77 aa, Saccharomyces cerevisiae
MVSMFSLFLLLIEQSPLVASLQQSQRHIVGVPWEKQHLYDSNEPDLTKWHCLNHEDIVLDISQINDGVCDCPDGSDE

SEQ ID NO: 872 - DNA, 300 bp, Saccharomyces cerevisiae
atgtctagtgtaccttataattcccaacttcctatatccaaccatctagagtacgatgaagatgaaaagaagagcagaggctcaaaactaggcctgaaatataaaatgatatactggaggaaaactttatgcagttcgctagcgagatggagaaagctaatactattaatatctttagctttgtttttattcatatggataagcgattccaccataagcagaaatccatctaccacaagttttcaaggccaaaatagtaacgataataagttgagtaatactggttctagcatcaactcc

SEQ ID NO: 873 - protein, 100 aa, Saccharomyces cerevisiae
MSSVPYNSQLPISNHLEYDEDEKKSRGSKLGLKYKMIYWRKTLCSSLARWRKLILLISLALFLFIWISDSTISRNPSTTSFQGQNSNDNKLSNTGSSINS

SEQ ID NO: 874 - DNA, 162 bp, Saccharomyces cerevisiae
atgagtggagtatcaaataaaacagtatcaattaatggttggtatggcatgccaattcatttactaagggaagaaggcgactttgcccagtttatgattctaaccatcaacgaattaaaaatagccatacatggttacctcagaaataccccatggtacaac

SEQ ID NO: 875 - protein, 54 aa, Saccharomyces cerevisiae
MSGVSNKTVSINGWYGMPIHLLREEGDFAQFMILTINELKIAIHGYLRNTPWYN

SEQ ID NO: 876 - DNA, 225 bp, Saccharomyces cerevisiae
atgaagtataataacagaaaactctcgttcaaccctaccacagtaagtatcgctggaacgttgcttacggtgttctttctcacaagactcgtgctttcgttcttctcgatatcgctattccagctggtaactttccaaggaatcttcaagccctatgttccagattttaaaaatactcccagcgtagagttctacgacctacgaaattaccaaggcaacaaagat

SEQ ID NO: 877 - protein, 75 aa, Saccharomyces cerevisiae
MKYNNRKLSFNPTTVSIAGTLLTVFFLTRLVLSFFSISLFQLVTFQGIFKPYVPDFKNTPSVEFYDLRNYQGNKD

SEQ ID NO: 878 - DNA, 210 bp, Saccharomyces cerevisiae
atgccagtctctgtaataaccacggttttagcatgtctgtggctctcttataggctctataagtttctcactattcctgtgtccagcatcgtctccactttgaagatcaaaactccaccggcaacaaaagtgtctatcgacaaaatagccacggattcagtgaccattcattgggagaacgaacctgtaaaagcggaggacaatggcagt

SEQ ID NO: 879 - protein, 70 aa, Saccharomyces cerevisiae
MPVSVITTVLACLWLSYRLYKFLTIPVSSIVSTLKIKTPPATKVSIDKIATDSVTIHWENEPVKAEDNGS

SEQ ID NO: 880 - DNA, 111 bp, Saccharomyces cerevisiae
atgcaagatttagagatttttttgagtattttcgctttcattttcgttttctactttggtgctcatagaacagtcatgaacagaaacaagagcgatgttccttacttgcag

SEQ ID NO: 881 - protein, 37 aa, Saccharomyces cerevisiae
MQDLEIFLSIFAFIFVFYFGAHRTVMNRNKSDVPYLQ

SEQ ID NO: 882 - DNA, 231 bp, Saccharomyces cerevisiae
atgtcaaagatagattcagttttaattatcggtggttctggttttcttggattgcacttaattcagcaattttttgatattaatcctaagccagacatccacatttttgatgttagagatctccctgaaaaactttcaaaacagtttacttttaatgtagacgacataaaatttcataagggtgatttaacatcacctgatgatatggaaaacgcaattaacgaaagtaaa

SEQ ID NO: 883 - protein, 77 aa, Saccharomyces cerevisiae
MSKIDSVLIIGGSGFLGLHLIQQFFDINPKPDIHIFDVRDLPEKLSKQFTFNVDDIKFHKGDLTSPDDMENAINESK

SEQ ID NO: 884 - DNA, 198 bp, Saccharomyces cerevisiae
atgcttatttcaaaatctaagatgtttaaaacattttggatactaaccagcatagttctcctggcatctgccaccgttgatattagtaaactacaagaattcgaagaatatcaaaagttcacgaatgaatctttactgtgggcaccgtatagatccaattgttactttggtatgaggcccagatatgtccatgaaagt

SEQ ID NO: 885 - protein, 66 aa, Saccharomyces cerevisiae
MLISKSKMFKTFWILTSIVLLASATVDISKLQEFEEYQKFTNESLLWAPYRSNCYFGMRPRYVHES

SEQ ID NO: 886 - DNA, 246 bp, Saccharomyces cerevisiae
atgtctaggaagttgtcccacctgatcgctacaaggaaatcaaaaacaatagtcgtaaccgtacttcttatttattctttgttgacatttcacttgtcaaacaaaaggctgctttctcagttttaccctagcaaagatgatttcaagcaaactcttctccctacgacttctcattcacaagatataaatttgaagaaacaaattacagttaacaagaaaaaaaatcaattgcataatttacgtgat

SEQ ID NO: 887 - protein, 82 aa, Saccharomyces cerevisiae
MSRKLSHLIATRKSKTIVVTVLLIYSLLTFHLSNKRLLSQFYPSKDDFKQTLLPTTSHSQDINLKKQITVNKKKNQLHNLRD

SEQ ID NO: 888 - DNA, 29 bp, Artificial Sequence
  Description of Artificial Sequence: primer
aaatacaacaatgagtactagtgcggaca

SEQ ID NO: 889 - DNA, 30 bp, Artificial Sequence
  Description of Artificial Sequence: primer
gacagtcctgatttttcaacttttttctta

SEQ ID NO: 890 - DNA, 29 bp, Artificial Sequence
  Description of Artificial Sequence: primer
aaatacaacaatgccggtatctgattctg

SEQ ID NO: 891 - DNA, 30 bp, Artificial Sequence
  Description of Artificial Sequence: primer
gacagtcctgaaatgtcctaattggatttt

SEQ ID NO: 892 - DNA, 30 bp, Artificial Sequence
  Description of Artificial Sequence: primer
aaatacaacaatgccagacaatctatcatt

SEQ ID NO: 893 - DNA, 30 bp, Artificial Sequence
  Description of Artificial Sequence: primer
gacagtcctgtttcttccagaatgagctgt

SEQ ID NO: 894 - DNA, 28 bp, Artificial Sequence
  Description of Artificial Sequence: primer
aaatacaacaatgaccggcttgaatgga

SEQ ID NO: 895 - DNA, 30 bp, Artificial Sequence
  Description of Artificial Sequence: primer
gacagtcctgaaatttgcttctcactgagc

SEQ ID NO: 896 - DNA, 28 bp, Artificial Sequence
  Description of Artificial Sequence: primer
aaatacaacaatgacgagaaacccgttt

SEQ ID NO: 897 - DNA, 30 bp, Artificial Sequence
  Description of Artificial Sequence: primer
gacagtcctgagactcttgtagattagcag

SEQ ID NO: 898 - DNA, 30 bp, Artificial Sequence
  Description of Artificial Sequence: primer
aaatacaacaatgtctcccatacaggttgt

SEQ ID NO: 899 - DNA, 30 bp, Artificial Sequence
  Description of Artificial Sequence: primer
gacagtcctgatcctccttgtatctatatt

SEQ ID NO: 900 - DNA, 30 bp, Artificial Sequence
  Description of Artificial Sequence: primer
aaatacaacaatgctatcttcagaagattt

SEQ ID NO: 901 - DNA, 30 bp, Artificial Sequence
  Description of Artificial Sequence: primer
gacagtcctgcgacttcatggactttttca

SEQ ID NO: 902 - DNA, 30 bp, Artificial Sequence
  Description of Artificial Sequence: primer
aaatacaacaatggacgatagtgtcagttt

SEQ ID NO: 903 - DNA, 30 bp, Artificial Sequence
  Description of Artificial Sequence: primer
gacagtcctgagatttgatcgactttgtca

SEQ ID NO: 904 - DNA, 30 bp, Artificial Sequence
  Description of Artificial Sequence: primer
aaatacaacaatgtcgcagacaattacatc

SEQ ID NO: 905 - DNA, 30 bp, Artificial Sequence
  Description of Artificial Sequence: primer
gacagtcctgcagtatttttgatttgctga

SEQ ID NO: 906 - DNA, 30 bp, Artificial Sequence
  Description of Artificial Sequence: primer
aaatacaacaatgaatcaaagcgatccgca

SEQ ID NO: 907 - DNA, 30 bp, Artificial Sequence
  Description of Artificial Sequence: primer
gacagtcctgaaccaatatagaatgggcaa

SEQ ID NO: 908 - DNA, 29 bp, Artificial Sequence
  Description of Artificial Sequence: primer
aaatacaacaatgtcacgtaagagctcga

SEQ ID NO: 909 - DNA, 30 bp, Artificial Sequence
  Description of Artificial Sequence: primer
gacagtcctgtagattgtttttgatagaat

SEQ ID NO: 910 - DNA, 30 bp, Artificial Sequence
  Description of Artificial Sequence: primer
aaatacaacaatgaagggattatcctcatt

SEQ ID NO: 911 - DNA, 27 bp, Artificial Sequence
  Description of Artificial Sequence: primer
gacagtcctggagtggcattcccctct

SEQ ID NO: 912 - DNA, 30 bp, Artificial Sequence
  Description of Artificial Sequence: primer
aaatacaacaatgtcgtcgtcgaagtctct

SEQ ID NO: 913 - DNA, 30 bp, Artificial Sequence
  Description of Artificial Sequence: primer
gacagtcctgttctagttcttgagcctgtc

SEQ ID NO: 914 - DNA, 30 bp, Artificial Sequence
  Description of Artificial Sequence: primer
aaatacaacaatggtagcaacaataatgca

SEQ ID NO: 915 - DNA, 30 bp, Artificial Sequence
  Description of Artificial Sequence: primer
gacagtcctggcttgctgaagatgattttg

SEQ ID NO: 916 - DNA, 30 bp, Artificial Sequence
  Description of Artificial Sequence: primer
aaatacaacaatgggaagtcatcgacgtta

SEQ ID NO: 917 - DNA, 26 bp, Artificial Sequence
  Description of Artificial Sequence: primer
gacagtcctgcggtgatagaccgcca

SEQ ID NO: 918 - DNA, 30 bp, Artificial Sequence
  Description of Artificial Sequence: primer
aaatacaacaatgaacgatacgctatcaag

SEQ ID NO: 919 - DNA, 28 bp, Artificial Sequence
  Description of Artificial Sequence: primer
gacagtcctgccaatccgaacctctctt

SEQ ID NO: 920 - DNA, 30 bp, Artificial Sequence
  Description of Artificial Sequence: primer
aaatacaacaatgactttaccaggtggtgt

SEQ ID NO: 921 - DNA, 30 bp, Artificial Sequence
  Description of Artificial Sequence: primer
gacagtcctgttgtctagcttgccattttc

SEQ ID NO: 922 - DNA, 30 bp, Artificial Sequence
  Description of Artificial Sequence: primer
aaatacaacaatgatgaaggaatcgaaatc

SEQ ID NO: 923 - DNA, 27 bp, Artificial Sequence
  Description of Artificial Sequence: primer
gacagtcctgggtcaaatcgtttccga

SEQ ID NO: 924 - DNA, 30 bp, Artificial Sequence
  Description of Artificial Sequence: primer
aaatacaacaatgaattcactcgttactca

SEQ ID NO: 925 - DNA, 29 bp, Artificial Sequence
  Description of Artificial Sequence: primer
gacagtcctgttcacctgcaatgaattgg

SEQ ID NO: 926 - DNA, 30 bp, Artificial Sequence
  Description of Artificial Sequence: primer
aaatacaacaatggaagacaaagatatcac

SEQ ID NO: 927 - DNA, 30 bp, Artificial Sequence
  Description of Artificial Sequence: primer
gacagtcctgcacttttgagctatagtttt

SEQ ID NO: 928 - DNA, 30 bp, Artificial Sequence
  Description of Artificial Sequence: primer
aaatacaacaatgataactgagggatttcc

SEQ ID NO: 929 - DNA, 28 bp, Artificial Sequence
  Description of Artificial Sequence: primer
gacagtcctgtaactgcaacagttgcgg

SEQ ID NO: 930 - DNA, 30 bp, Artificial Sequence
  Description of Artificial Sequence: primer
aaatacaacaatgaacgatagccaaaactg

SEQ ID NO: 931 - DNA, 30 bp, Artificial Sequence
  Description of Artificial Sequence: primer
gacagtcctgtagtagaatggacgtggttt

SEQ ID NO: 932 - DNA, 30 bp, Artificial Sequence
  Description of Artificial Sequence: primer
aaatacaacaatggatcctaatagtaacag

SEQ ID NO: 933 - DNA, 30 bp, Artificial Sequence
  Description of Artificial Sequence: primer
gacagtcctgagattgtttctgaggaggct

SEQ ID NO: 934 - DNA, 30 bp, Artificial Sequence
  Description of Artificial Sequence: primer
aaatacaacaatgagtatgtcaagcaaaaa

SEQ ID NO: 935 - DNA, 30 bp, Artificial Sequence
  Description of Artificial Sequence: primer
gacagtcctgtgaaaattgtctttttaatt

SEQ ID NO: 936 - DNA, 26 bp, Artificial Sequence
  Description of Artificial Sequence: primer
aaatacaacaatggcaagcgaacagt

SEQ ID NO: 937 - DNA, 27 bp, Artificial Sequence
  Description of Artificial Sequence: primer
gacagtcctgtctcttcggtgcgtctg

SEQ ID NO: 938 - DNA, 30 bp, Artificial Sequence
  Description of Artificial Sequence: primer
aaatacaacaatgaaaaacttatcttttct

SEQ ID NO: 939 - DNA, 29 bp, Artificial Sequence
  Description of Artificial Sequence: primer
gacagtcctgcattcctctttcactttcg

SEQ ID NO: 940 - DNA, 30 bp, Artificial Sequence
  Description of Artificial Sequence: primer
aaatacaacaatgagcaatatcaaaagcac

SEQ ID NO: 941 - DNA, 30 bp, Artificial Sequence
  Description of Artificial Sequence: primer
gacagtcctgatctgaatccatattaaagg

SEQ ID NO: 942 - DNA, 30 bp, Artificial Sequence
  Description of Artificial Sequence: primer
aaatacaacaatgtctacctttgaaacttt

SEQ ID NO: 943 - DNA, 30 bp, Artificial Sequence
  Description of Artificial Sequence: primer
gacagtcctgatcggaaccacgactagtga

SEQ ID NO: 944 - DNA, 30 bp, Artificial Sequence
  Description of Artificial Sequence: primer
aaatacaacaatgtcagatcctatagtaac

SEQ ID NO: 945 - DNA, 30 bp, Artificial Sequence
  Description of Artificial Sequence: primer
gacagtcctgtctagatttcattgactttt

SEQ ID NO: 946 - DNA, 28 bp, Artificial Sequence
  Description of Artificial Sequence: primer
aaatacaacaatgtcaagtccctccaaa

SEQ ID NO: 947 - DNA, 30 bp, Artificial Sequence
  Description of Artificial Sequence: primer
gacagtcctgttttttaccattgagttcat

SEQ ID NO: 948 - DNA, 29 bp, Artificial Sequence
  Description of Artificial Sequence: primer
aaatacaacaatggattctgccaagatca

SEQ ID NO: 949 - DNA, 30 bp, Artificial Sequence
  Description of Artificial Sequence: primer
gacagtcctggatatccactatacagtcag

SEQ ID NO: 950 - DNA, 30 bp, Artificial Sequence
  Description of Artificial Sequence: primer
aaatacaacaatgtcacaagacgctgctat

SEQ ID NO: 951 - DNA, 30 bp, Artificial Sequence
  Description of Artificial Sequence: primer
gacagtcctgtctctttggaatttcaacga

SEQ ID NO: 952 - DNA, 30 bp, Artificial Sequence; identical to SEQ ID NO: 950
  Description of Artificial Sequence: primer

SEQ ID NO: 953 - DNA, 30 bp, Artificial Sequence; identical to SEQ ID NO: 951
  Description of Artificial Sequence: primer

SEQ ID NO: 954 - DNA, 30 bp, Artificial Sequence
  Description of Artificial Sequence: primer
aaatacaacaatgaattcaactccagattt

SEQ ID NO: 955 - DNA, 30 bp, Artificial Sequence
  Description of Artificial Sequence: primer
gacagtcctgtttacctgtatttgggttgg

SEQ ID NO: 956 - DNA, 30 bp, Artificial Sequence
  Description of Artificial Sequence: primer
aaatacaacaatgacatcgtctgcttcttc

SEQ ID NO: 957 - DNA, 28 bp, Artificial Sequence
  Description of Artificial Sequence: primer
gacagtcctggaactggtgcggagtata

SEQ ID NO: 958 - DNA, 30 bp, Artificial Sequence
  Description of Artificial Sequence: primer
aaatacaacaatggtctcattgaaaataaa

SEQ ID NO: 959 - DNA, 27 bp, Artificial Sequence
  Description of Artificial Sequence: primer
gacagtcctgttgcgttgtcgtcgtca

SEQ ID NO: 960 - DNA, 30 bp, Artificial Sequence
  Description of Artificial Sequence: primer
aaatacaacaatgggaatacacataccata

SEQ ID NO: 961 - DNA, 30 bp, Artificial Sequence
  Description of Artificial Sequence: primer
gacagtcctggttaaaagtgatcatgaccg

SEQ ID NO: 962 - DNA, 30 bp, Artificial Sequence
  Description of Artificial Sequence: primer
aaatacaacaatgaaggatttaaaattatc

SEQ ID NO: 963 - DNA, 28 bp, Artificial Sequence
  Description of Artificial Sequence: primer
gacagtcctgtctgtcatgatcgccatt

SEQ ID NO: 964 - DNA, 30 bp, Artificial Sequence
  Description of Artificial Sequence: primer
aaatacaacaatgttgatgagcacgttacc

SEQ ID NO: 965 - DNA, 30 bp, Artificial Sequence
  Description of Artificial Sequence: primer
gacagtcctgttgccattttctgtagataa

SEQ ID NO: 966 - DNA, 30 bp, Artificial Sequence
  Description of Artificial Sequence: primer
aaatacaacaatgacaaattcaaaagaaga

SEQ ID NO: 967 - DNA, 29 bp, Artificial Sequence
  Description of Artificial Sequence: primer
gacagtcctgtctttgcttaagctctctc

SEQ ID NO: 968 - DNA, 30 bp, Artificial Sequence
  Description of Artificial Sequence: primer
aaatacaacaatggaccctggtattgctaa

SEQ ID NO: 969 - DNA, 30 bp, Artificial Sequence
  Description of Artificial Sequence: primer
gacagtcctggttgtacatttctgcgtaaa

SEQ ID NO: 970 - DNA, 29 bp, Artificial Sequence
  Description of Artificial Sequence: primer
aaatacaacaatgtctagtgcgcaatcct

SEQ ID NO: 971 - DNA, 28 bp, Artificial Sequence
  Description of Artificial Sequence: primer
gacagtcctgtctttttggtggctcaac

SEQ ID NO: 972 - DNA, 28 bp, Artificial Sequence
  Description of Artificial Sequence: primer
aaatacaacaatgaggtcctcgaagtct

SEQ ID NO: 973 - DNA, 30 bp, Artificial Sequence
  Description of Artificial Sequence: primer
gacagtcctgcttatggtcgggtctggaaa

SEQ ID NO: 974 - DNA, 28 bp, Artificial Sequence
  Description of Artificial Sequence: primer
aaatacaacaatgttggaagagggaaat

SEQ ID NO: 975 - DNA, 30 bp, Artificial Sequence
  Description of Artificial Sequence: primer
gacagtcctgattcagtatggaatcgtccg

SEQ ID NO: 976 - DNA, 30 bp, Artificial Sequence
  Description of Artificial Sequence: primer
aaatacaacaatgtcttcagcaccattatt

SEQ ID NO: 977 - DNA, 30 bp, Artificial Sequence
  Description of Artificial Sequence: primer
gacagtcctgcaaaaaggtacgctcattgg

SEQ ID NO: 978 - DNA, 30 bp, Artificial Sequence
  Description of Artificial Sequence: primer
aaatacaacaatgtcaatatcatcaaagat

SEQ ID NO: 979 - DNA, 28 bp, Artificial Sequence
  Description of Artificial Sequence: primer
gacagtcctgaaaacgtgggaaggattc

SEQ ID NO: 980 - DNA, 30 bp, Artificial Sequence
  Description of Artificial Sequence: primer
aaatacaacaatgcctaacaaagtgtttaa

SEQ ID NO: 981 - DNA, 30 bp, Artificial Sequence
  Description of Artificial Sequence: primer
gacagtcctgctgaatccttaatttacggt

SEQ ID NO: 982 - DNA, 30 bp, Artificial Sequence
  Description of Artificial Sequence: primer
aaatacaacaatgtctggaacttttcatgg

SEQ ID NO: 983 - DNA, 30 bp, Artificial Sequence
  Description of Artificial Sequence: primer
gacagtcctgtaattccacatcatcaaacg

SEQ ID NO: 984 - DNA, 30 bp, Artificial Sequence
  Description of Artificial Sequence: primer
aaatacaacaatggttagttcaagtgtttc

SEQ ID NO: 985 - DNA, 30 bp, Artificial Sequence
  Description of Artificial Sequence: primer
gacagtcctggggtttgtatggaatgtcca

SEQ ID NO: 986 - DNA, 29 bp, Artificial Sequence
  Description of Artificial Sequence: primer
aaatacaacaatgtctgatgcggctcctt

SEQ ID NO: 987 - DNA, 28 bp, Artificial Sequence
  Description of Artificial Sequence: primer
gacagtcctgaccttgcaactcatcgaa

SEQ ID NO: 988 - DNA, 30 bp, Artificial Sequence
  Description of Artificial Sequence: primer
aaatacaacaatgttgttctactcgttcgt

SEQ ID NO: 989 - DNA, 29 bp, Artificial Sequence
  Description of Artificial Sequence: primer
gacagtcctgcatagaaggaccatccatt

SEQ ID NO: 990 - DNA, 30 bp, Artificial Sequence
  Description of Artificial Sequence: primer
aaatacaacaatgtcgtccttatccacttc

SEQ ID NO: 991 - DNA, 28 bp, Artificial Sequence
  Description of Artificial Sequence: primer
gacagtcctgttctgcttcaccttcaaa

SEQ ID NO: 992 - DNA, 30 bp, Artificial Sequence
  Description of Artificial Sequence: primer
aaatacaacaatgactgatacatcatcctc

SEQ ID NO: 993 - DNA, 30 bp, Artificial Sequence
  Description of Artificial Sequence: primer
gacagtcctggtacttctttcttcttttca

SEQ ID NO: 994 - DNA, 30 bp, Artificial Sequence
  Description of Artificial Sequence: primer
aaatacaacaatgagtattcggaatgataa

SEQ ID NO: 995 - DNA, 30 bp, Artificial Sequence
  Description of Artificial Sequence: primer
gacagtcctgtgactttcttagatgaactt

SEQ ID NO: 996 - DNA, 28 bp, Artificial Sequence
  Description of Artificial Sequence: primer
aaatacaacaatgcagtttccattcgct

SEQ ID NO: 997 - DNA, 29 bp, Artificial Sequence
  Description of Artificial Sequence: primer
gacagtcctgtgacacagaagtctgggaa

SEQ ID NO: 998 - DNA, 29 bp, Artificial Sequence
  Description of Artificial Sequence: primer
aaatacaacaatgtcctacaacgatccaa

SEQ ID NO: 999 - DNA, 28 bp, Artificial Sequence
  Description of Artificial Sequence: primer
gacagtcctgtccatcttgagaagacgg

SEQ ID NO: 1000 - DNA, 29 bp, Artificial Sequence
  Description of Artificial Sequence: primer
aaatacaacaatgtcggaaggaagaacgt

SEQ ID NO: 1001 - DNA, 28 bp, Artificial Sequence
  Description of Artificial Sequence: primer
gacagtcctgctgcttttcaccttggtc

SEQ ID NO: 1002 - DNA, 30 bp, Artificial Sequence
  Description of Artificial Sequence: primer
aaatacaacaatggagagtcgaactacagg

SEQ ID NO: 1003 - DNA, 28 bp, Artificial Sequence
  Description of Artificial Sequence: primer
gacagtcctgtgcagacttccttcttgc

SEQ ID NO: 1004 - DNA, 28 bp, Artificial Sequence
  Description of Artificial Sequence: primer
aaatacaacaatgcctagaaacccattg

SEQ ID NO: 1005 - DNA, 30 bp, Artificial Sequence
  Description of Artificial Sequence: primer
gacagtcctgggatagatctttactcaggt

SEQ ID NO: 1006 - DNA, 27 bp, Artificial Sequence
  Description of Artificial Sequence: primer
aaatacaacaatgacgattaccgtggg

SEQ ID NO: 1007 - DNA, 30 bp, Artificial Sequence
  Description of Artificial Sequence: primer
gacagtcctgttgtggtacttctggaattt

SEQ ID NO: 1008 - DNA, 30 bp, Artificial Sequence
  Description of Artificial Sequence: primer
aaatacaacaatgggagaatttaaacctcc

SEQ ID NO: 1009 - DNA, 28 bp, Artificial Sequence
  Description of Artificial Sequence: primer
gacagtcctgtacagatctaccggcggt

SEQ ID NO: 1010 - DNA, 27 bp, Artificial Sequence
  Description of Artificial Sequence: primer
aaatacaacaatggaaccgctgctttt

SEQ ID NO: 1011 - DNA, 28 bp, Artificial Sequence
  Description of Artificial Sequence: primer
gacagtcctgtcttccctgtggaacttc

SEQ ID NO: 1012 - DNA, 30 bp, Artificial Sequence
  Description of Artificial Sequence: primer
aaatacaacaatgtctgaagaagctgccta

SEQ ID NO: 1013 - DNA, 28 bp, Artificial Sequence
  Description of Artificial Sequence: primer
gacagtcctggggcttctttggaatttc

SEQ ID NO: 1014 - DNA, 30 bp, Artificial Sequence
  Description of Artificial Sequence: primer
aaatacaacaatgaattcaactcccgatct

SEQ ID NO: 1015 - DNA, 27 bp, Artificial Sequence
  Description of Artificial Sequence: primer
gacagtcctgtccggtgtttggagggg

SEQ ID NO: 1016 - DNA, 29 bp, Artificial Sequence
  Description of Artificial Sequence: primer
aaatacaacaatgtcggaacttgaaaacg

SEQ ID NO: 1017 - DNA, 30 bp, Artificial Sequence
  Description of Artificial Sequence: primer
gacagtcctgcgatttcttctctagttgtt

SEQ ID NO: 1018 - DNA, 30 bp, Artificial Sequence
  Description of Artificial Sequence: primer
aaatacaacaatgtctctttccaaatattt

SEQ ID NO: 1019 - DNA, 30 bp, Artificial Sequence
  Description of Artificial Sequence: primer
gacagtcctgctgtttgtactcattgtctt

SEQ ID NO: 1020 - DNA, 29 bp, Artificial Sequence
  Description of Artificial Sequence: primer
aaatacaacaatgaagtttgctgaccatc

SEQ ID NO: 1021 - DNA, 30 bp, Artificial Sequence
  Description of Artificial Sequence: primer
gacagtcctgcaaccagtcttcaatgaagt

SEQ ID NO: 1022 - DNA, 30 bp, Artificial Sequence
  Description of Artificial Sequence: primer
aaatacaacaatgacacagcttcagatttc

SEQ ID NO: 1023 - DNA, 30 bp, Artificial Sequence
  Description of Artificial Sequence: primer
gacagtcctgatacaacgtggtgttcgcat

SEQ ID NO: 1024 - DNA, 27 bp, Artificial Sequence
  Description of Artificial Sequence: primer
aaatacaacaatgcgatttggcctgcc

SEQ ID NO: 1025 - DNA, 30 bp, Artificial Sequence
  Description of Artificial Sequence: primer
gacagtcctggttacctgcaacgtaacttg

SEQ ID NO: 1026 - DNA, 28 bp, Artificial Sequence
  Description of Artificial Sequence: primer
aaatacaacaatgggtttgattgtctca

SEQ ID NO: 1027 - DNA, 30 bp, Artificial Sequence
  Description of Artificial Sequence: primer
gacagtcctgtgtaatcaatccaatacgac

SEQ ID NO: 1028 - DNA, 29 bp, Artificial Sequence
  Description of Artificial Sequence: primer
aaatacaacaatggctaacgacgctctaa

SEQ ID NO: 1029 - DNA, 30 bp, Artificial Sequence
  Description of Artificial Sequence: primer
gacagtcctggttatacaagaacgactctt

SEQ ID NO: 1030 - DNA, 30 bp, Artificial Sequence
  Description of Artificial Sequence: primer
aaatacaacaatgacaaggttcatgaacag

SEQ ID NO: 1031 - DNA, 30 bp, Artificial Sequence
  Description of Artificial Sequence: primer
gacagtcctgtgttgaagaaggctctgcat

SEQ ID NO: 1032 - DNA, 29 bp, Artificial Sequence
  Description of Artificial Sequence: primer
aaatacaacaatgcattttagaagaacga

SEQ ID NO: 1033 - DNA, 28 bp, Artificial Sequence
  Description of Artificial Sequence: primer
gacagtcctgttttttaactggagcaaa

SEQ ID NO: 1034 - DNA, 30 bp, Artificial Sequence
  Description of Artificial Sequence: primer
aaatacaacaatgactgatcgtaaaaccaa

SEQ ID NO: 1035 - DNA, 30 bp, Artificial Sequence
  Description of Artificial Sequence: primer
gacagtcctgcttttctggaacaacaactt

SEQ ID NO: 1036 - DNA, 30 bp, Artificial Sequence
  Description of Artificial Sequence: primer
aaatacaacaatgtccggtgttaataatac

SEQ ID NO: 1037 - DNA, 28 bp, Artificial Sequence
  Description of Artificial Sequence: primer
gacagtcctggggtttttgaggtaagtc

SEQ ID NO: 1038 - DNA, 30 bp, Artificial Sequence
  Description of Artificial Sequence: primer
aaatacaacaatgttcacttttctcaaaat

SEQ ID NO: 1039 - DNA, 30 bp, Artificial Sequence
  Description of Artificial Sequence: primer
gacagtcctgcgaaacatagcatttgaaag

SEQ ID NO: 1040 - DNA, 30 bp, Artificial Sequence
  Description of Artificial Sequence: primer
aaatacaacaatgccaacaacttatgtgcc

SEQ ID NO: 1041 - DNA, 30 bp, Artificial Sequence
  Description of Artificial Sequence: primer
gacagtcctgtgtttttgcacggtcccata

SEQ ID NO: 1042 - DNA, 29 bp, Artificial Sequence
  Description of Artificial Sequence: primer
aaatacaacaatgtcagcggatgctagta

SEQ ID NO: 1043 - DNA, 30 bp, Artificial Sequence
  Description of Artificial Sequence: primer
gacagtcctgccaacgaagttttctatctt

SEQ ID NO: 1044 - DNA, 29 bp, Artificial Sequence
  Description of Artificial Sequence: primer
aaatacaacaatggcaagcgaacagtcct

SEQ ID NO: 1045 - DNA, 28 bp, Artificial Sequence
  Description of Artificial Sequence: primer
gacagtcctgtctcttcggtgcgtctgg

SEQ ID NO: 1046 - DNA, 30 bp, Artificial Sequence; identical to SEQ ID NO: 938
  Description of Artificial Sequence: primer

SEQ ID NO: 1047 - DNA, 29 bp, Artificial Sequence
  Description of Artificial Sequence: primer
gacagtcctgcattcctctttcactttcg

SEQ ID NO: 1048 - DNA, 30 bp, Artificial Sequence
  Description of Artificial Sequence: primer
aaatacaacaatgtcatacaagtcagcaat

SEQ ID NO: 1049 - DNA, 30 bp, Artificial Sequence
  Description of Artificial Sequence: primer
gacagtcctggattgctggaatattcttgg

SEQ ID NO: 1050 - DNA, 30 bp, Artificial Sequence
  Description of Artificial Sequence: primer
aaatacaacaatgaactttttaagttttaa

SEQ ID NO: 1051 - DNA, 30 bp, Artificial Sequence
  Description of Artificial Sequence: primer
gacagtcctgtgacctctgtactagttggg

SEQ ID NO: 1052 - DNA, 30 bp, Artificial Sequence
  Description of Artificial Sequence: primer
aaatacaacaatgcattggacgtccatctt

SEQ ID NO: 1053 - DNA, 30 bp, Artificial Sequence
  Description of Artificial Sequence: primer
gacagtcctgtgcacagttttttttgatgg

SEQ ID NO: 1054 - DNA, 30 bp, Artificial Sequence
  Description of Artificial Sequence: primer
aaatacaacaatgagtaatacttcttcgta

SEQ ID NO: 1055 - DNA, 30 bp, Artificial Sequence
  Description of Artificial Sequence: primer
gacagtcctgattcttcaagtggtgcttca

SEQ ID NO: 1056 - DNA, 30 bp, Artificial Sequence
  Description of Artificial Sequence: primer
aaatacaacaatgccaacagctaagaggac

SEQ ID NO: 1057 - DNA, 30 bp, Artificial Sequence
  Description of Artificial Sequence: primer
gacagtcctgtttagcaatgggtctgcatg

SEQ ID NO: 1058 - DNA, 28 bp, Artificial Sequence
  Description of Artificial Sequence: primer
aaatacaacaatgctcaaccatcccagc

SEQ ID NO: 1059 - DNA, 28 bp, Artificial Sequence
  Description of Artificial Sequence: primer
gacagtcctgggaaagcccgtagtagga

SEQ ID NO: 1060 - DNA, 30 bp, Artificial Sequence
  Description of Artificial Sequence: primer
aaatacaacaatggcagttgaggagaacaa

SEQ ID NO: 1061 - DNA, 30 bp, Artificial Sequence
  Description of Artificial Sequence: primer
gacagtcctgttcagacatgggcttcttgg

SEQ ID NO: 1062 - DNA, 30 bp, Artificial Sequence
  Description of Artificial Sequence: primer
aaatacaacaatggaagctatttcacaatt

SEQ ID NO: 1063 - DNA, 30 bp, Artificial Sequence
  Description of Artificial Sequence: primer
gacagtcctgcaaacatactactaccgtga

SEQ ID NO: 1064 - DNA, 30 bp, Artificial Sequence
  Description of Artificial Sequence: primer
aaatacaacaatgaaacttcaattggcggc

SEQ ID NO: 1065 - DNA, 30 bp, Artificial Sequence
  Description of Artificial Sequence: primer
gacagtcctgcacagaaccgcagtaggggt

SEQ ID NO: 1066 - DNA, 30 bp, Artificial Sequence
  Description of Artificial Sequence: primer
aaatacaacaatggctatctgggagcaact

SEQ ID NO: 1067 - DNA, 30 bp, Artificial Sequence
  Description of Artificial Sequence: primer
gacagtcctgcttctccttgacataaagtg

SEQ ID NO: 1068 - DNA, 30 bp, Artificial Sequence
  Description of Artificial Sequence: primer
aaatacaacaatggttagaacccgtgtatt

SEQ ID NO: 1069 - DNA, 30 bp, Artificial Sequence
  Description of Artificial Sequence: primer
gacagtcctgaatattcttcatgtcctcta

SEQ ID NO: 1070 - DNA, 30 bp, Artificial Sequence
  Description of Artificial Sequence: primer
aaatacaacaatgatttgcataacgtgcat

SEQ ID NO: 1071 - DNA, 30 bp, Artificial Sequence
  Description of Artificial Sequence: primer
gacagtcctgacaaaaccagttctttacgt

SEQ ID NO: 1072 - DNA, 30 bp, Artificial Sequence
  Description of Artificial Sequence: primer
aaatacaacaatgaacactgatcaacaacc

SEQ ID NO: 1073 - DNA, 28 bp, Artificial Sequence
  Description of Artificial Sequence: primer
gacagtcctgtccaggagggccgtaact

SEQ ID NO: 1074 - DNA, 30 bp, Artificial Sequence
  Description of Artificial Sequence: primer
aaatacaacaatggtggataaaaataggac

SEQ ID NO: 1075 - DNA, 30 bp, Artificial Sequence
  Description of Artificial Sequence: primer
gacagtcctgcaaactaggtttaatattat

SEQ ID NO: 1076 - DNA, 30 bp, Artificial Sequence
  Description of Artificial Sequence: primer
aaatacaacaatgggcaatcagtcattagt

SEQ ID NO: 1077 - DNA, 30 bp, Artificial Sequence
  Description of Artificial Sequence: primer
gacagtcctgaaaactgtccgaaagaatat

SEQ ID NO: 1078 - DNA, 30 bp, Artificial Sequence
  Description of Artificial Sequence: primer
aaatacaacaatgagttccgtcaataaaga

SEQ ID NO: 1079 - DNA, 30 bp, Artificial Sequence
  Description of Artificial Sequence: primer
gacagtcctgcaagaaaccaacaccagcaa

SEQ ID NO: 1080 - DNA, 30 bp, Artificial Sequence
  Description of Artificial Sequence: primer
aaatacaacaatgtctgaattcgctactag

SEQ ID NO: 1081 - DNA, 27 bp, Artificial Sequence
  Description of Artificial Sequence: primer
gacagtcctgtggctttgctgggagtt

SEQ ID NO: 1082 - DNA, 30 bp, Artificial Sequence
  Description of Artificial Sequence: primer
aaatacaacaatgactaacgctttgctctc

SEQ ID NO: 1083 - DNA, 28 bp, Artificial Sequence
  Description of Artificial Sequence: primer
gacagtcctgcgtcaagaagggcacacc

SEQ ID NO: 1084 - DNA, 30 bp, Artificial Sequence
  Description of Artificial Sequence: primer
aaatacaacaatgagcaacgctaatcctta

SEQ ID NO: 1085 - DNA, 30 bp, Artificial Sequence
  Description of Artificial Sequence: primer
gacagtcctgcgctttcaattgatactgca

SEQ ID NO: 1086 - DNA, 30 bp, Artificial Sequence
  Description of Artificial Sequence: primer
aaatacaacaatgatcaccggtaaagaatt

SEQ ID NO: 1087 - DNA, 28 bp, Artificial Sequence
  Description of Artificial Sequence: primer
gacagtcctgatcggcaatcaaggccaa

SEQ ID NO: 1088 - DNA, 30 bp, Artificial Sequence
  Description of Artificial Sequence: primer
aaatacaacaatgttgtttaaatccctttc

SEQ ID NO: 1089 - DNA, 30 bp, Artificial Sequence
  Description of Artificial Sequence: primer
gacagtcctggtgatctagagtggtattga

SEQ ID NO: 1090 - DNA, 30 bp, Artificial Sequence
  Description of Artificial Sequence: primer
aaatacaacaatgggtaaaattgcagagtt

SEQ ID NO: 1091 - DNA, 29 bp, Artificial Sequence
  Description of Artificial Sequence: primer
gacagtcctgtcgtaccaggaaatccagg

SEQ ID NO: 1092 - DNA, 30 bp, Artificial Sequence
  Description of Artificial Sequence: primer
aaatacaacaatgtcttacaattttacagg

SEQ ID NO: 1093 - DNA, 30 bp, Artificial Sequence
  Description of Artificial Sequence: primer
gacagtcctgccatcccatgttggccaagt

SEQ ID NO: 1094 - DNA, 30 bp, Artificial Sequence
  Description of Artificial Sequence: primer
aaatacaacaatgagtgatcaaaataatcg

SEQ ID NO: 1095 - DNA, 30 bp, Artificial Sequence
  Description of Artificial Sequence: primer
gacagtcctgatggtggttgacaaaacctc

SEQ ID NO: 1096 - DNA, 30 bp, Artificial Sequence
  Description of Artificial Sequence: primer
aaatacaacaatgggcaggtttagtaacat

SEQ ID NO: 1097 - DNA, 30 bp, Artificial Sequence
  Description of Artificial Sequence: primer
gacagtcctggtgggcttcttcttcatcct

SEQ ID NO: 1098 - DNA, 30 bp, Artificial Sequence
  Description of Artificial Sequence: primer
aaatacaacaatggatgaaactgtgaacat

SEQ ID NO: 1099 - DNA, 30 bp, Artificial Sequence
  Description of Artificial Sequence: primer
gacagtcctgctgctttaacttccgcttca

SEQ ID NO: 1100 - DNA, 30 bp, Artificial Sequence
  Description of Artificial Sequence: primer
aaatacaacaatgactgctcagattccgta

SEQ ID NO: 1101 - DNA, 30 bp, Artificial Sequence
  Description of Artificial Sequence: primer
gacagtcctgactcgcattgtgactaatct

SEQ ID NO: 1102 - DNA, 30 bp, Artificial Sequence
  Description of Artificial Sequence: primer
aaatacaacaatgatgcgtcgcacgctatt

SEQ ID NO: 1103 - DNA, 30 bp, Artificial Sequence
  Description of Artificial Sequence: primer
gacagtcctgggtagaagtcgtcgtggttg

SEQ ID NO: 1104 - DNA, 30 bp, Artificial Sequence
  Description of Artificial Sequence: primer
aaatacaacaatgacattatctttcgctca

SEQ ID NO: 1105 - DNA, 30 bp, Artificial Sequence
  Description of Artificial Sequence: primer
gacagtcctgtgaaactgtagttgtaacaa

SEQ ID NO: 1106 - DNA, 30 bp, Artificial Sequence
  Description of Artificial Sequence: primer
aaatacaacaatgcaatcatccactgaaag

SEQ ID NO: 1107 - DNA, 28 bp, Artificial Sequence
  Description of Artificial Sequence: primer
gacagtcctgtctttttggtggctcaac

SEQ ID NO: 1108 - DNA, 30 bp, Artificial Sequence
  Description of Artificial Sequence: primer
aaatacaacaatgaccgaagactttatttc

SEQ ID NO: 1109 - DNA, 30 bp, Artificial Sequence
  Description of Artificial Sequence: primer
gacagtcctgtggtttcagagtcctcttca

SEQ ID NO: 1110 - DNA, 30 bp, Artificial Sequence
  Description of Artificial Sequence: primer
aaatacaacaatgtcccagcccactaagaa

SEQ ID NO: 1111 - DNA, 30 bp, Artificial Sequence
  Description of Artificial Sequence: primer
gacagtcctggtcactgctacccttatctg

SEQ ID NO: 1112 - DNA, 30 bp, Artificial Sequence
  Description of Artificial Sequence: primer
aaatacaacaatgaagaattcgacagctgc

SEQ ID NO: 1113 - DNA, 30 bp, Artificial Sequence
  Description of Artificial Sequence: primer
gacagtcctgcactgatgtatcatcttcat

SEQ ID NO: 1114 - DNA, 29 bp, Artificial Sequence
  Description of Artificial Sequence: primer
aaatacaacaatggtgaacgttggtcctt

SEQ ID NO: 1115 - DNA, 30 bp, Artificial Sequence
  Description of Artificial Sequence: primer
gacagtcctgatctctcattacctgccttt

SEQ ID NO: 1116 - DNA, 30 bp, Artificial Sequence
  Description of Artificial Sequence: primer
aaatacaacaatgtcatcatcctcaagttc

SEQ ID NO: 1117 - DNA, 28 bp, Artificial Sequence
  Description of Artificial Sequence: primer
gacagtcctgaccctgcccttcatcttc

SEQ ID NO: 1118 - DNA, 30 bp, Artificial Sequence
  Description of Artificial Sequence: primer
aaatacaacaatgtcaggtgttaataatac

SEQ ID NO: 1119 - DNA, 29 bp, Artificial Sequence
  Description of Artificial Sequence: primer
gacagtcctggggtttttgaggtaagtca

SEQ ID NO: 1120 - DNA, 30 bp, Artificial Sequence
  Description of Artificial Sequence: primer
aaatacaacaatgagaccgaacaaaacaag

SEQ ID NO: 1121 - DNA, 30 bp, Artificial Sequence
  Description of Artificial Sequence: primer
gacagtcctgaccaccacacatctcactgc

SEQ ID NO: 1122 - DNA, 29 bp, Artificial Sequence
  Description of Artificial Sequence: primer
aaatacaacaatgcccgaggccaagctta

SEQ ID NO: 1123 - DNA, 29 bp, Artificial Sequence
  Description of Artificial Sequence: primer
gacagtcctgttcggagttggggtccaat

SEQ ID NO: 1124 - DNA, 26 bp, Artificial Sequence
  Description of Artificial Sequence: primer
aaatacaacaatgttgcaagcgccct

SEQ ID NO: 1125 - DNA, 30 bp, Artificial Sequence
  Description of Artificial Sequence: primer
gacagtcctggtctggatcattgacgtcca

SEQ ID NO: 1126 - DNA, 30 bp, Artificial Sequence
  Description of Artificial Sequence: primer
aaatacaacaatggtaaatatactgccctt

SEQ ID NO: 1127 - DNA, 26 bp, Artificial Sequence
  Description of Artificial Sequence: primer
gacagtcctgatcgccatcgacggag

SEQ ID NO: 1128 - DNA, 30 bp, Artificial Sequence
  Description of Artificial Sequence: primer
aaatacaacaatgtcttccactgaagcaaa

SEQ ID NO: 1129 - DNA, 29 bp, Artificial Sequence
  Description of Artificial Sequence: primer
gacagtcctggccagcgtgcaccccatca

SEQ ID NO: 1130 - DNA, 30 bp, Artificial Sequence
  Description of Artificial Sequence: primer
aaatacaacaatggttgccaattgggtact

SEQ ID NO: 1131 - DNA, 30 bp, Artificial Sequence
  Description of Artificial Sequence: primer
gacagtcctgggagcatattcttagccacc

SEQ ID NO: 1132 - DNA, 30 bp, Artificial Sequence
  Description of Artificial Sequence: primer
aaatacaacaatggtgaatactaggggcta

SEQ ID NO: 1133 - DNA, 30 bp, Artificial Sequence
  Description of Artificial Sequence: primer
gacagtcctgacttaagaacaaatcgaatt

SEQ ID NO: 1134 - DNA, 30 bp, Artificial Sequence
  Description of Artificial Sequence: primer
aaatacaacaatgagttataataatccgta

SEQ ID NO: 1135 - DNA, 30 bp, Artificial Sequence
  Description of Artificial Sequence: primer
gacagtcctgacttttaatctcatttttca

SEQ ID NO: 1136 - DNA, 30 bp, Artificial Sequence
  Description of Artificial Sequence: primer
aaatacaacaatgaagatgcctctaaagaa

SEQ ID NO: 1137 - DNA, 30 bp, Artificial Sequence
  Description of Artificial Sequence: primer
gacagtcctgatgtcttgcctttaaatctt

SEQ ID NO: 1138 - DNA, 30 bp, Artificial Sequence
  Description of Artificial Sequence: primer
aaatacaacaatggatatactcaagagggg

SEQ ID NO: 1139 - DNA, 29 bp, Artificial Sequence
  Description of Artificial Sequence: primer
gacagtcctggtgcctttggctcaagact

SEQ ID NO: 1140 - DNA, 30 bp, Artificial Sequence
  Description of Artificial Sequence: primer
aaatacaacaatggaaggtatgaatatggg

SEQ ID NO: 1141 - DNA, 30 bp, Artificial Sequence
  Description of Artificial Sequence: primer
gacagtcctgcttaccactattgtttgcat

SEQ ID NO: 1142 - DNA, 30 bp, Artificial Sequence
  Description of Artificial Sequence: primer
aaatacaacaatgtcagaagatcaaaaaag

SEQ ID NO: 1143 - DNA, 30 bp, Artificial Sequence
  Description of Artificial Sequence: primer
gacagtcctgatgaccttcagcgtcaaaag

SEQ ID NO: 1144 - DNA, 30 bp, Artificial Sequence
  Description of Artificial Sequence: primer
aaatacaacaatgagttttacaggttcatt

SEQ ID NO: 1145 - DNA, 30 bp, Artificial Sequence
  Description of Artificial Sequence: primer
gacagtcctgtctggtacggctcataactt

SEQ ID NO: 1146 - DNA, 30 bp, Artificial Sequence
  Description of Artificial Sequence: primer
aaatacaacaatgatcttcctaaacacctt

SEQ ID NO: 1147 - DNA, 30 bp, Artificial Sequence
  Description of Artificial Sequence: primer
gacagtcctgaaaagtcttatccaggactt

SEQ ID NO: 1148 - DNA, 30 bp, Artificial Sequence
  Description of Artificial Sequence: primer
aaatacaacaatgtattcaattgttaaaga

SEQ ID NO: 1149 - DNA, 30 bp, Artificial Sequence
  Description of Artificial Sequence: primer
gacagtcctgatcgaaaaatctccaccatg

SEQ ID NO: 1150 - DNA, 28 bp, Artificial Sequence
  Description of Artificial Sequence: primer
aaatacaacaatgccgtcaaacgtacgt

SEQ ID NO: 1151 - DNA, 29 bp, Artificial Sequence
  Description of Artificial Sequence: primer
gacagtcctgcattaacccaaatggcttg

SEQ ID NO: 1152 - DNA, 30 bp, Artificial Sequence
  Description of Artificial Sequence: primer
aaatacaacaatgattgtggggttgacact

SEQ ID NO: 1153 - DNA, 30 bp, Artificial Sequence
  Description of Artificial Sequence: primer
gacagtcctgattacttttaataaacagcc

SEQ ID NO: 1154 - DNA, 30 bp, Artificial Sequence
  Description of Artificial Sequence: primer
aaatacaacaatggtatacacttcaacgta

SEQ ID NO: 1155 - DNA, 29 bp, Artificial Sequence
  Description of Artificial Sequence: primer
gacagtcctgcagtaggggccagttttgt

SEQ ID NO: 1156 - DNA, 30 bp, Artificial Sequence
  Description of Artificial Sequence: primer
aaatacaacaatggtcgcaatctcaatgat

SEQ ID NO: 1157 - DNA, 30 bp, Artificial Sequence
  Description of Artificial Sequence: primer
gacagtcctgattgtaagagctatattggg

SEQ ID NO: 1158 - DNA, 30 bp, Artificial Sequence
  Description of Artificial Sequence: primer
aaatacaacaatgctgcatcaaaaaatagc

SEQ ID NO: 1159 - DNA, 30 bp, Artificial Sequence
  Description of Artificial Sequence: primer
gacagtcctgtcttttggttttattgagac

SEQ ID NO: 1160 - DNA, 27 bp, Artificial Sequence
  Description of Artificial Sequence: primer
aaatacaacaatgcaagcccaaggttc

SEQ ID NO: 1161 - DNA, 30 bp, Artificial Sequence
  Description of Artificial Sequence: primer
gacagtcctgatctctggcatccttgaact

SEQ ID NO: 1162 - DNA, 30 bp, Artificial Sequence
  Description of Artificial Sequence: primer
aaatacaacaatgtctgattatgttgaact

SEQ ID NO: 1163 - DNA, 30 bp, Artificial Sequence
  Description of Artificial Sequence: primer
gacagtcctggtctgaaccacgagatgtaa

SEQ ID NO: 1164 - DNA, 30 bp, Artificial Sequence
  Description of Artificial Sequence: primer
aaatacaacaatgacaaaggaacgtatgac

SEQ ID NO: 1165 - DNA, 30 bp, Artificial Sequence
  Description of Artificial Sequence: primer
gacagtcctggtgcctgttttctagtttac

SEQ ID NO: 1166 - DNA, 28 bp, Artificial Sequence
  Description of Artificial Sequence: primer
aaatacaacaatgggaagcgaaccgttt

SEQ ID NO: 1167 - DNA, 30 bp, Artificial Sequence
  Description of Artificial Sequence: primer
gacagtcctgtggaatatgtgcttgagtat

SEQ ID NO: 1168 - DNA, 30 bp, Artificial Sequence
  Description of Artificial Sequence: primer
aaatacaacaatgggaatatttcgttggaa

SEQ ID NO: 1169 - DNA, 30 bp, Artificial Sequence
  Description of Artificial Sequence: primer
gacagtcctgccttttttctaatttattct

SEQ ID NO: 1170 - DNA, 30 bp, Artificial Sequence
  Description of Artificial Sequence: primer
aaatacaacaatgggaaatatgataaagaa

SEQ ID NO: 1171 - DNA, 30 bp, Artificial Sequence
  Description of Artificial Sequence: primer
gacagtcctgagacttcaaatgtgaagaac

SEQ ID NO: 1172 - DNA, 30 bp, Artificial Sequence
  Description of Artificial Sequence: primer
aaatacaacaatggctgaaactgaaagact

SEQ ID NO: 1173 - DNA, 29 bp, Artificial Sequence
  Description of Artificial Sequence: primer
gacagtcctgagaatcggttaacgcaatg

SEQ ID NO: 1174 - DNA, 30 bp, Artificial Sequence
  Description of Artificial Sequence: primer
aaatacaacaatgagtatttcaaattggat

SEQ ID NO: 1175 - DNA, 30 bp, Artificial Sequence
  Description of Artificial Sequence: primer
gacagtcctgaaggcagtttcttcgaccaa

SEQ ID NO: 1176 - DNA, 30 bp, Artificial Sequence
  Description of Artificial Sequence: primer
aaatacaacaatgaagccggaaaaactctt

SEQ ID NO: 1177 - DNA, 30 bp, Artificial Sequence
  Description of Artificial Sequence: primer
gacagtcctgggtgtgatcaccaccggttt

SEQ ID NO: 1178 - DNA, 30 bp, Artificial Sequence
  Description of Artificial Sequence: primer
aaatacaacaatggctttacatcaatttga

SEQ ID NO: 1179 - DNA, 30 bp, Artificial Sequence
  Description of Artificial Sequence: primer
gacagtcctgagatctagaagagatcgacg

SEQ ID NO: 1180 - DNA, 30 bp, Artificial Sequence
  Description of Artificial Sequence: primer
aaatacaacaatgagctatggaactataaa

SEQ ID NO: 1181 - DNA, 30 bp, Artificial Sequence
  Description of Artificial Sequence: primer
gacagtcctgtgaagtatctacgaagatcc

SEQ ID NO: 1182 - DNA, 30 bp, Artificial Sequence
  Description of Artificial Sequence: primer
aaatacaacaatgaatatgctcattgtcgg

SEQ ID NO: 1183 - DNA, 30 bp, Artificial Sequence
  Description of Artificial Sequence: primer
gacagtcctgacgtgacctttcaccaacca

SEQ ID NO: 1184 - DNA, 30 bp, Artificial Sequence
  Description of Artificial Sequence: primer
aaatacaacaatgtctgacaaggaacaaac

SEQ ID NO: 1185 - DNA, 29 bp, Artificial Sequence
  Description of Artificial Sequence: primer
gacagtcctgtttgtgcactggagcagga

SEQ ID NO: 1186 - DNA, 30 bp, Artificial Sequence
  Description of Artificial Sequence: primer
aaatacaacaatgctgatcatcaatgggaa

SEQ ID NO: 1187 - DNA, 28 bp, Artificial Sequence
  Description of Artificial Sequence: primer
gacagtcctgagaacgttccggatagcg

SEQ ID NO: 1188 - DNA, 29 bp, Artificial Sequence
  Description of Artificial Sequence: primer
aaatacaacaatggcgcgtcaaaagctta

SEQ ID NO: 1189 - DNA, 30 bp, Artificial Sequence
  Description of Artificial Sequence: primer
gacagtcctgggacacttgagcatcattgg

SEQ ID NO: 1190 - DNA, 30 bp, Artificial Sequence
  Description of Artificial Sequence: primer
aaatacaacaatgagattctcacactttct

SEQ ID NO: 1191 - DNA, 29 bp, Artificial Sequence
  Description of Artificial Sequence: primer
gacagtcctggtcggagtctccccttttg

SEQ ID NO: 1192 - DNA, 30 bp, Artificial Sequence
  Description of Artificial Sequence: primer
aaatacaacaatgacggagactaaggattt

SEQ ID NO: 1193 - DNA, 29 bp, Artificial Sequence
  Description of Artificial Sequence: primer
gacagtcctgcgaccgagacttgctcttc

SEQ ID NO: 1194 - DNA, 30 bp, Artificial Sequence
  Description of Artificial Sequence: primer
aaatacaacaatggtgcgttttgtttcaat

SEQ ID NO: 1195 - DNA, 30 bp, Artificial Sequence
  Description of Artificial Sequence: primer
gacagtcctgagacctattcccagcctgtg

SEQ ID NO: 1196 - DNA, 30 bp, Artificial Sequence
  Description of Artificial Sequence: primer
aaatacaacaatgtctatatatctacacat

SEQ ID NO: 1197 - DNA, 30 bp, Artificial Sequence
  Description of Artificial Sequence: primer
gacagtcctgactcctgcaaagaaagtgga

SEQ ID NO: 1198 - DNA, 30 bp, Artificial Sequence
  Description of Artificial Sequence: primer
aaatacaacaatgcctctatcaaaggtgga

SEQ ID NO: 1199 - DNA, 30 bp, Artificial Sequence
  Description of Artificial Sequence: primer
gacagtcctgaaagatgtatgcaacacgat

SEQ ID NO: 1200 - DNA, 30 bp, Artificial Sequence
  Description of Artificial Sequence: primer
aaatacaacaatgaataaagagcatttgct

SEQ ID NO: 1201 - DNA, 30 bp, Artificial Sequence
  Description of Artificial Sequence: primer
gacagtcctgcattgccactaaaggaggat

SEQ ID NO: 1202 - DNA, 30 bp, Artificial Sequence
  Description of Artificial Sequence: primer
aaatacaacaatgaaacctccgttaaacat

SEQ ID NO: 1203 - DNA, 30 bp, Artificial Sequence
  Description of Artificial Sequence: primer
gacagtcctgttgtagtaattggcggtatg

SEQ ID NO: 1204 - DNA, 30 bp, Artificial Sequence
  Description of Artificial Sequence: primer
aaatacaacaatgagcgagggaactgtcaa

SEQ ID NO: 1205 - DNA, 30 bp, Artificial Sequence
  Description of Artificial Sequence: primer
gacagtcctgcattgctttatagtcaattt

SEQ ID NO: 1206 - DNA, 30 bp, Artificial Sequence
  Description of Artificial Sequence: primer
aaatacaacaatgagtactcctgcaaacta

SEQ ID NO: 1207 - DNA, 28 bp, Artificial Sequence
  Description of Artificial Sequence: primer
gacagtcctgaggaggggtgtcgacaac

SEQ ID NO: 1208 - DNA, 30 bp, Artificial Sequence
  Description of Artificial Sequence: primer
aaatacaacaatgtcatggaatctactatt

SEQ ID NO: 1209 - DNA, 30 bp, Artificial Sequence
  Description of Artificial Sequence: primer
gacagtcctgatatttttggtcatccacta

SEQ ID NO: 1210 - DNA, 30 bp, Artificial Sequence
  Description of Artificial Sequence: primer
aaatacaacaatgaatctgcaagaactatt

SEQ ID NO: 1211 - DNA, 30 bp, Artificial Sequence
  Description of Artificial Sequence: primer
gacagtcctgatgatctgtactgaaaaata

SEQ ID NO: 1212 - DNA, 30 bp, Artificial Sequence
  Description of Artificial Sequence: primer
aaatacaacaatggtgaacgaattagagaa

SEQ ID NO: 1213 - DNA, 30 bp, Artificial Sequence
  Description of Artificial Sequence: primer
gacagtcctgaacttcgagcaactttccat

SEQ ID NO: 1214 - DNA, 30 bp, Artificial Sequence
  Description of Artificial Sequence: primer
aaatacaacaatgtcatcagatatcagaga

SEQ ID NO: 1215 - DNA, 28 bp, Artificial Sequence
  Description of Artificial Sequence: primer
gacagtcctgcggggtgtccgggttagt

SEQ ID NO: 1216 - DNA, 30 bp, Artificial Sequence
  Description of Artificial Sequence: primer
aaatacaacaatgacgcttggtaatagacg

SEQ ID NO: 1217 - DNA, 29 bp, Artificial Sequence
  Description of Artificial Sequence: primer
gacagtcctgagagttgctcgagtctggg

SEQ ID NO: 1218 - DNA, 30 bp, Artificial Sequence
  Description of Artificial Sequence: primer
aaatacaacaatgtggaactcactaaaagc

SEQ ID NO: 1219 - DNA, 30 bp, Artificial Sequence
  Description of Artificial Sequence: primer
gacagtcctgattaatgctgcctgtttcgt

SEQ ID NO: 1220 - DNA, 30 bp, Artificial Sequence
  Description of Artificial Sequence: primer
aaatacaacaatgacaaagaaatcatttgt

SEQ ID NO: 1221 - DNA, 30 bp, Artificial Sequence
  Description of Artificial Sequence: primer
gacagtcctgagtccactcaggtcctttga

SEQ ID NO: 1222 - DNA, 30 bp, Artificial Sequence
  Description of Artificial Sequence: primer
aaatacaacaatgcctcaaacgcacgaaat

SEQ ID NO: 1223 - DNA, 30 bp, Artificial Sequence
  Description of Artificial Sequence: primer
gacagtcctgagaatcatcagttttttcat

SEQ ID NO: 1224 - DNA, 30 bp, Artificial Sequence
  Description of Artificial Sequence: primer
aaatacaacaatgccagaaaagttagccat

SEQ ID NO: 1225 - DNA, 30 bp, Artificial Sequence
  Description of Artificial Sequence: primer
gacagtcctgattgagtatcgagtcatcat

SEQ ID NO: 1226 - DNA, 30 bp, Artificial Sequence
  Description of Artificial Sequence: primer
aaatacaacaatgcaacacaaggatacggc

SEQ ID NO: 1227 - DNA, 30 bp, Artificial Sequence
  Description of Artificial Sequence: primer
gacagtcctgcttttccaggaacattggta

SEQ ID NO: 1228 - DNA, 30 bp, Artificial Sequence
  Description of Artificial Sequence: primer
aaatacaacaatgctaatactgttacgttt

SEQ ID NO: 1229 - DNA, 30 bp, Artificial Sequence
  Description of Artificial Sequence: primer
gacagtcctgaaataatcgtaatattattg

SEQ ID NO: 1230 - DNA, 30 bp, Artificial Sequence
  Description of Artificial Sequence: primer
aaatacaacaatggcagtccttaacttgaa

SEQ ID NO: 1231 - DNA, 30 bp, Artificial Sequence
  Description of Artificial Sequence: primer
gacagtcctgtgagatatgcctatttttga

SEQ ID NO: 1232 - DNA, 27 bp, Artificial Sequence
  Description of Artificial Sequence: primer
aaatacaacaatgggcgaaggtttgct

SEQ ID NO: 1233 - DNA, 30 bp, Artificial Sequence
  Description of Artificial Sequence: primer
gacagtcctgtagcacagcagtcaatgaaa

SEQ ID NO: 1234 - DNA, 30 bp, Artificial Sequence
  Description of Artificial Sequence: primer
aaatacaacaatggcaaaggataatagtga

SEQ ID NO: 1235 - DNA, 30 bp, Artificial Sequence
  Description of Artificial Sequence: primer
gacagtcctgctcatattcgatttcatttg

SEQ ID NO: 1236 - DNA, 30 bp, Artificial Sequence
  Description of Artificial Sequence: primer
aaatacaacaatgtcgctgatcagcatcct

SEQ ID NO: 1237 - DNA, 30 bp, Artificial Sequence
  Description of Artificial Sequence: primer
gacagtcctgtttgaactcagtagttttcc

SEQ ID NO: 1238 - DNA, 30 bp, Artificial Sequence
  Description of Artificial Sequence: primer
aaatacaacaatgccgtccaataatagcag

SEQ ID NO: 1239 - DNA, 30 bp, Artificial Sequence
  Description of Artificial Sequence: primer
gacagtcctgatagtagtttatcaatcctg

SEQ ID NO: 1240 - DNA, 30 bp, Artificial Sequence
  Description of Artificial Sequence: primer
aaatacaacaatgtcatacggaagagaaga

SEQ ID NO: 1241 - DNA, 30 bp, Artificial Sequence
  Description of Artificial Sequence: primer
gacagtcctggtcgttatcagccgccccta

SEQ ID NO: 1242 - DNA, 30 bp, Artificial Sequence
  Description of Artificial Sequence: primer
aaatacaacaatgagcaacgttactacgcc

SEQ ID NO: 1243 - DNA, 30 bp, Artificial Sequence
  Description of Artificial Sequence: primer
gacagtcctggttaccattgtactcgtttc

SEQ ID NO: 1244 - DNA, 30 bp, Artificial Sequence
  Description of Artificial Sequence: primer
aaatacaacaatgactaaatcggttggtga

SEQ ID NO: 1245 - DNA, 28 bp, Artificial Sequence
  Description of Artificial Sequence: primer
gacagtcctgatttcgcagtcttggaga

SEQ ID NO: 1246 - DNA, 28 bp, Artificial Sequence
  Description of Artificial Sequence: primer
aaatacaacaatggcaaaagacggcttc

SEQ ID NO: 1247 - DNA, 30 bp, Artificial Sequence
  Description of Artificial Sequence: primer
gacagtcctgggggtttagtagtgtggtgt

SEQ ID NO: 1248 - DNA, 30 bp, Artificial Sequence
  Description of Artificial Sequence: primer
aaatacaacaatgcaggggagaaaaaggac

SEQ ID NO: 1249 - DNA, 30 bp, Artificial Sequence
  Description of Artificial Sequence: primer
gacagtcctggctcaagttttcatgactac

SEQ ID NO: 1250 - DNA, 30 bp, Artificial Sequence
  Description of Artificial Sequence: primer
aaatacaacaatggatgcaaagaaaaatac

SEQ ID NO: 1251 - DNA, 30 bp, Artificial Sequence
  Description of Artificial Sequence: primer
gacagtcctgattacagaagataccggtaa

SEQ ID NO: 1252 - DNA, 30 bp, Artificial Sequence
  Description of Artificial Sequence: primer
aaatacaacaatgaaaaatatcatttcatt

SEQ ID NO: 1253 - DNA, 30 bp, Artificial Sequence
  Description of Artificial Sequence: primer
gacagtcctgcaacgcctgcttcaaagtca

SEQ ID NO: 1254 - DNA, 30 bp, Artificial Sequence
  Description of Artificial Sequence: primer
aaatacaacaatgacatcagctacggacaa

SEQ ID NO: 1255 - DNA, 30 bp, Artificial Sequence
  Description of Artificial Sequence: primer
gacagtcctgatgacggtaattcatttctc

SEQ ID NO: 1256 - DNA, 30 bp, Artificial Sequence
  Description of Artificial Sequence: primer
aaatacaacaatgggaacggatccccttat

SEQ ID NO: 1257 - DNA, 30 bp, Artificial Sequence
  Description of Artificial Sequence: primer
gacagtcctgtggtaaatagtagctcaata

SEQ ID NO: 1258 - DNA, 30 bp, Artificial Sequence
  Description of Artificial Sequence: primer
aaatacaacaatggatgttgattctgacgt

SEQ ID NO: 1259 - DNA, 30 bp, Artificial Sequence
  Description of Artificial Sequence: primer
gacagtcctgtttgaattgaatgggatagt

SEQ ID NO: 1260 - DNA, 30 bp, Artificial Sequence
  Description of Artificial Sequence: primer
aaatacaacaatgaccaaacaacaaacttc

SEQ ID NO: 1261 - DNA, 30 bp, Artificial Sequence
  Description of Artificial Sequence: primer
gacagtcctgtttttgcttatggctgaacc

SEQ ID NO: 1262 - DNA, 30 bp, Artificial Sequence
  Description of Artificial Sequence: primer
aaatacaacaatgtgccataattctgttag

SEQ ID NO: 1263 - DNA, 30 bp, Artificial Sequence
  Description of Artificial Sequence: primer
gacagtcctgttcgtggtcgtggaacttgc

SEQ ID NO: 1264 - DNA, 30 bp, Artificial Sequence
  Description of Artificial Sequence: primer
aaatacaacaatggcaaacactgtaggagg

SEQ ID NO: 1265 - DNA, 30 bp, Artificial Sequence
  Description of Artificial Sequence: primer
gacagtcctgtagtatgagacatgcttgaa

SEQ ID NO: 1266 - DNA, 30 bp, Artificial Sequence
  Description of Artificial Sequence: primer
aaatacaacaatggcggttcaacaaagaaa

SEQ ID NO: 1267 - DNA, 30 bp, Artificial Sequence
  Description of Artificial Sequence: primer
gacagtcctgcttattagccaatgcctgtt

SEQ ID NO: 1268 - DNA, 29 bp, Artificial Sequence
  Description of Artificial Sequence: primer
aaatacaacaatgtttcaacagctgtcgg

SEQ ID NO: 1269 - DNA, 29 bp, Artificial Sequence
  Description of Artificial Sequence: primer
gacagtcctgaagtggtaatgggcaaacc

SEQ ID NO: 1270 - DNA, 30 bp, Artificial Sequence
  Description of Artificial Sequence: primer
aaatacaacaatggcattgtttcgtgccct

SEQ ID NO: 1271 - DNA, 30 bp, Artificial Sequence
  Description of Artificial Sequence: primer
gacagtcctgaaattttggtgccgttttca

SEQ ID NO: 1272 - DNA, 30 bp, Artificial Sequence
  Description of Artificial Sequence: primer
aaatacaacaatggcaaaccctttttcgag

SEQ ID NO: 1273 - DNA, 30 bp, Artificial Sequence
  Description of Artificial Sequence: primer
gacagtcctggtcgcttaaagcgggtttgt

SEQ ID NO: 1274 - DNA, 30 bp, Artificial Sequence
  Description of Artificial Sequence: primer
aaatacaacaatggaaatcgatggcaacac

SEQ ID NO: 1275 - DNA, 30 bp, Artificial Sequence
  Description of Artificial Sequence: primer
gacagtcctgaaccatgtagttttgattgg

SEQ ID NO: 1276 - DNA, 30 bp, Artificial Sequence
  Description of Artificial Sequence: primer
aaatacaacaatgagagtatatcagttttg

SEQ ID NO: 1277 - DNA, 27 bp, Artificial Sequence
  Description of Artificial Sequence: primer
gacagtcctgttcttcatccggcaatt

SEQ ID NO: 1278 - DNA, 30 bp, Artificial Sequence
  Description of Artificial Sequence: primer
aaatacaacaatgctagtaaataaagtgat

SEQ ID NO: 1279 - DNA, 30 bp, Artificial Sequence
  Description of Artificial Sequence: primer
gacagtcctgaccagcttgatgtatcattg

SEQ ID NO: 1280 - DNA, 30 bp, Artificial Sequence
  Description of Artificial Sequence: primer
aaatacaacaatgattcaatttaaaagtcc

SEQ ID NO: 1281 - DNA, 30 bp, Artificial Sequence
  Description of Artificial Sequence: primer
gacagtcctgtggccttaaattagtggcac

SEQ ID NO: 1282 - DNA, 30 bp, Artificial Sequence
  Description of Artificial Sequence: primer
aaatacaacaatgcgatggtatatatatag

SEQ ID NO: 1283 - DNA, 30 bp, Artificial Sequence
  Description of Artificial Sequence: primer
gacagtcctgcggatttgagggtagattaa

SEQ ID NO: 1284 - DNA, 30 bp, Artificial Sequence
  Description of Artificial Sequence: primer
aaatacaacaatggacaagtatttgaattc

SEQ ID NO: 1285 - DNA, 30 bp, Artificial Sequence
  Description of Artificial Sequence: primer
gacagtcctgagaatggctttccaccaagt

SEQ ID NO: 1286 - DNA, 30 bp, Artificial Sequence
  Description of Artificial Sequence: primer
aaatacaacaatgccagagtatacgctact

SEQ ID NO: 1287 - DNA, 30 bp, Artificial Sequence
  Description of Artificial Sequence: primer
gacagtcctgagaacctcttgacaataacg

SEQ ID NO: 1288 - DNA, 29 bp, Artificial Sequence
  Description of Artificial Sequence: primer
aaatacaacaatgaggatcgaaaagcacc

SEQ ID NO: 1289 - DNA, 30 bp, Artificial Sequence
  Description of Artificial Sequence: primer
gacagtcctgagtatcagcaatatttttca

SEQ ID NO: 1290 - DNA, 30 bp, Artificial Sequence
  Description of Artificial Sequence: primer
aaatacaacaatgtcgtcgtcaattacaga

SEQ ID NO: 1291 - DNA, 30 bp, Artificial Sequence
  Description of Artificial Sequence: primer
gacagtcctgagcgcttaggtttggcttat

SEQ ID NO: 1292 - DNA, 28 bp, Artificial Sequence
  Description of Artificial Sequence: primer
aaatacaacaatgtccgaagaacggcat

SEQ ID NO: 1293 - DNA, 30 bp, Artificial Sequence
  Description of Artificial Sequence: primer
gacagtcctgatagtctaatttactcccac

SEQ ID NO: 1294 - DNA, 30 bp, Artificial Sequence
  Description of Artificial Sequence: primer
aaatacaacaatgacttcgtttcaagcggt

SEQ ID NO: 1295 - DNA, 30 bp, Artificial Sequence
  Description of Artificial Sequence: primer
gacagtcctgacaactagtcatgaggctac

SEQ ID NO: 1296 - DNA, 30 bp, Artificial Sequence
  Description of Artificial Sequence: primer
aaatacaacaatggaaaacaaactactttg

SEQ ID NO: 1297 - DNA, 30 bp, Artificial Sequence
  Description of Artificial Sequence: primer
gacagtcctgtagtctttgttcatatggtt

SEQ ID NO: 1298 - DNA, 30 bp, Artificial Sequence
  Description of Artificial Sequence: primer
aaatacaacaatgaccattattcagacggt

SEQ ID NO: 1299 - DNA, 30 bp, Artificial Sequence
  Description of Artificial Sequence: primer
gacagtcctgtttgaaataaacgtctctaa

SEQ ID NO: 1300 - DNA, 27 bp, Artificial Sequence
  Description of Artificial Sequence: primer
aaatacaacaatgtctgctcccgctgc

SEQ ID NO: 1301 - DNA, 30 bp, Artificial Sequence
  Description of Artificial Sequence: primer
gacagtcctgcagccatgtatgtatattgt

SEQ ID NO: 1302 - DNA, 30 bp, Artificial Sequence
  Description of Artificial Sequence: primer
aaatacaacaatgagtcagtcttacgaagc

SEQ ID NO: 1303 - DNA, 30 bp, Artificial Sequence
  Description of Artificial Sequence: primer
gacagtcctggcgtagtgaataaaaataaa

SEQ ID NO: 1304 - DNA, 30 bp, Artificial Sequence
  Description of Artificial Sequence: primer
aaatacaacaatgataaaaaatggtacatg

SEQ ID NO: 1305 - DNA, 30 bp, Artificial Sequence
  Description of Artificial Sequence: primer
gacagtcctgcaacaatataaatagaggaa

SEQ ID NO: 1306 - DNA, 30 bp, Artificial Sequence
  Description of Artificial Sequence: primer
aaatacaacaatggaggaaactaagtactc

SEQ ID NO: 1307 - DNA, 30 bp, Artificial Sequence
  Description of Artificial Sequence: primer
gacagtcctgggaaagtcccattggagaat

SEQ ID NO: 1308 - DNA, 30 bp, Artificial Sequence
  Description of Artificial Sequence: primer
aaatacaacaatgagttctagtgttgttgg

SEQ ID NO: 1309 - DNA, 30 bp, Artificial Sequence
  Description of Artificial Sequence: primer
gacagtcctgggaatcaaactgtgcagaca

SEQ ID NO: 1310 - DNA, 30 bp, Artificial Sequence
  Description of Artificial Sequence: primer
aaatacaacaatgtcttcactagaagtggt

SEQ ID NO: 1311 - DNA, 30 bp, Artificial Sequence
  Description of Artificial Sequence: primer
gacagtcctgggcggatattactgatataa

SEQ ID NO: 1312 - DNA, 30 bp, Artificial Sequence
  Description of Artificial Sequence: primer
aaatacaacaatgtcggatcattctcccat

SEQ ID NO: 1313 - DNA, 30 bp, Artificial Sequence
  Description of Artificial Sequence: primer
gacagtcctgaacctctacacggtcaggct

SEQ ID NO: 1314 - DNA, 30 bp, Artificial Sequence
  Description of Artificial Sequence: primer
aaatacaacaatgagtaatcctcaaaaagc

SEQ ID NO: 1315 - DNA, 30 bp, Artificial Sequence
  Description of Artificial Sequence: primer
gacagtcctgttgtggaacatacgtgggag

SEQ ID NO: 1316 - DNA, 30 bp, Artificial Sequence
  Description of Artificial Sequence: primer
aaatacaacaatgtctaacgaatctaacga

SEQ ID NO: 1317 - DNA, 30 bp, Artificial Sequence
  Description of Artificial Sequence: primer
gacagtcctggtggtttcttaaggtatctc

SEQ ID NO: 1318 - DNA, 30 bp, Artificial Sequence
  Description of Artificial Sequence: primer
aaatacaacaatggatgaatttgaatctac

SEQ ID NO: 1319 - DNA, 30 bp, Artificial Sequence
  Description of Artificial Sequence: primer
gacagtcctggtgtctttgatctaggacct

SEQ ID NO: 1320 - DNA, 30 bp, Artificial Sequence
  Description of Artificial Sequence: primer
aaatacaacaatgatggactcgtcaagcaa

SEQ ID NO: 1321 - DNA, 30 bp, Artificial Sequence
  Description of Artificial Sequence: primer
gacagtcctgagattctgtattcagagact

SEQ ID NO: 1322 - DNA, 30 bp, Artificial Sequence
  Description of Artificial Sequence: primer
aaatacaacaatgagtttcggtagtaaagt

SEQ ID NO: 1323 - DNA, 30 bp, Artificial Sequence
  Description of Artificial Sequence: primer
gacagtcctgattagaccagaacccccatg

SEQ ID NO: 1324 - DNA, 30 bp, Artificial Sequence
  Description of Artificial Sequence: primer
aaatacaacaatgttgtctttcacaaccaa

SEQ ID NO: 1325 - DNA, 30 bp, Artificial Sequence
  Description of Artificial Sequence: primer
gacagtcctggaaactgaatgatgtgaacg

SEQ ID NO: 1326 - DNA, 30 bp, Artificial Sequence
  Description of Artificial Sequence: primer
aaatacaacaatggattccacagcacttaa

SEQ ID NO: 1327 - DNA, 30 bp, Artificial Sequence
  Description of Artificial Sequence: primer
gacagtcctgtggaggatggtgaacaaccc

SEQ ID NO: 1328 - DNA, 30 bp, Artificial Sequence
  Description of Artificial Sequence: primer
aaatacaacaatgaataggactgtcttttt

SEQ ID NO: 1329 - DNA, 30 bp, Artificial Sequence
  Description of Artificial Sequence: primer
gacagtcctgaatacccaatccgtccttcg

SEQ ID NO: 1330 - DNA, 30 bp, Artificial Sequence
  Description of Artificial Sequence: primer
aaatacaacaatgactggcatcaaagctca

SEQ ID NO: 1331 - DNA, 27 bp, Artificial Sequence
  Description of Artificial Sequence: primer
gacagtcctgtttttgagcgctggagg

SEQ ID NO: 1332 - DNA, 30 bp, Artificial Sequence
  Description of Artificial Sequence: primer
aaatacaacaatgaactcttccacttcttc

SEQ ID NO: 1333 - DNA, 30 bp, Artificial Sequence
  Description of Artificial Sequence: primer
gacagtcctgccctattgtatcaaaaacag

SEQ ID NO: 1334 - DNA, 28 bp, Artificial Sequence
  Description of Artificial Sequence: primer
aaatacaacaatgggcagtgcttggaca

SEQ ID NO: 1335 - DNA, 30 bp, Artificial Sequence
  Description of Artificial Sequence: primer
gacagtcctgtctcaaagtgatatctacag

SEQ ID NO: 1336 - DNA, 30 bp, Artificial Sequence
  Description of Artificial Sequence: primer
aaatacaacaatgtctccaaactcgtcgaa

SEQ ID NO: 1337 - DNA, 30 bp, Artificial Sequence
  Description of Artificial Sequence: primer
gacagtcctgataccaatcaccatagaatt

SEQ ID NO: 1338 - DNA, 29 bp, Artificial Sequence
  Description of Artificial Sequence: primer
aaatacaacaatggcgaggcctcaaaatc

SEQ ID NO: 1339 - DNA, 30 bp, Artificial Sequence
  Description of Artificial Sequence: primer
gacagtcctgggcgttggtggctcttatag

SEQ ID NO: 1340 - DNA, 29 bp, Artificial Sequence
  Description of Artificial Sequence: primer
aaatacaacaatgaattgcaaggcggtaa

SEQ ID NO: 1341 - DNA, 29 bp, Artificial Sequence
  Description of Artificial Sequence: primer
gacagtcctgctcgggtgaatattcccag

SEQ ID NO: 1342 - DNA, 30 bp, Artificial Sequence
  Description of Artificial Sequence: primer
aaatacaacaatgacagcagctaataagaa

SEQ ID NO: 1343 - DNA, 28 bp, Artificial Sequence
  Description of Artificial Sequence: primer
gacagtcctgagatttcgacccagcctg

SEQ ID NO: 1344 - DNA, 30 bp, Artificial Sequence
  Description of Artificial Sequence: primer
aaatacaacaatggtatcagctttgaatcc

SEQ ID NO: 1345 - DNA, 30 bp, Artificial Sequence
  Description of Artificial Sequence: primer
gacagtcctgttcacgattgcccagatagt

SEQ ID NO: 1346 - DNA, 30 bp, Artificial Sequence
  Description of Artificial Sequence: primer
aaatacaacaatgcacctagatctcataca

SEQ ID NO: 1347 - DNA, 30 bp, Artificial Sequence
  Description of Artificial Sequence: primer
gacagtcctggccagcacacgaaacatcac

SEQ ID NO: 1348 - DNA, 30 bp, Artificial Sequence
  Description of Artificial Sequence: primer
aaatacaacaatgaagttctcgcattcctt

SEQ ID NO: 1349 - DNA, 30 bp, Artificial Sequence
  Description of Artificial Sequence: primer
gacagtcctggttgtagttggcgataagac

SEQ ID NO: 1350 - DNA, 30 bp, Artificial Sequence
  Description of Artificial Sequence: primer
aaatacaacaatggacaagaagaaggatct

SEQ ID NO: 1351 - DNA, 30 bp, Artificial Sequence
  Description of Artificial Sequence: primer
gacagtcctgatgggtcttgaacatgttat

SEQ ID NO: 1352 - DNA, 28 bp, Artificial Sequence
  Description of Artificial Sequence: primer
aaatacaacaatggagacgccgcaaatg

SEQ ID NO: 1353 - DNA, 30 bp, Artificial Sequence
  Description of Artificial Sequence: primer
gacagtcctgagcagcttcattgatattag

SEQ ID NO: 1354 - DNA, 30 bp, Artificial Sequence
  Description of Artificial Sequence: primer
aaatacaacaatggacaaatataccaacag

SEQ ID NO: 1355 - DNA, 30 bp, Artificial Sequence
  Description of Artificial Sequence: primer
gacagtcctgtttcctccagctagaccagt

SEQ ID NO: 1356 - DNA, 30 bp, Artificial Sequence
  Description of Artificial Sequence: primer
aaatacaacaatgtcaactttattagaaag

SEQ ID NO: 1357 - DNA, 30 bp, Artificial Sequence
  Description of Artificial Sequence: primer
gacagtcctgttcattatgcaaataaaaca

SEQ ID NO: 1358 - DNA, 30 bp, Artificial Sequence
  Description of Artificial Sequence: primer
aaatacaacaatgtcacagcaggagaatgg

SEQ ID NO: 1359 - DNA, 30 bp, Artificial Sequence
  Description of Artificial Sequence: primer
gacagtcctggggttctgaacctgtatctt

SEQ ID NO: 1360 - DNA, 30 bp, Artificial Sequence
  Description of Artificial Sequence: primer
aaatacaacaatggctgacagttcttcgac

SEQ ID NO: 1361 - DNA, 28 bp, Artificial Sequence
  Description of Artificial Sequence: primer
gacagtcctggccttcaggaactggttc

SEQ ID NO: 1362 - DNA, 30 bp, Artificial Sequence
  Description of Artificial Sequence: primer
aaatacaacaatgcaacttgtgccgctaga

SEQ ID NO: 1363 - DNA, 30 bp, Artificial Sequence
  Description of Artificial Sequence: primer
gacagtcctgcccatcagacgacttccggt

SEQ ID NO: 1364 - DNA, 30 bp, Artificial Sequence
  Description of Artificial Sequence: primer
aaatacaacaatgctggaaactgatcactc

SEQ ID NO: 1365 - DNA, 30 bp, Artificial Sequence
  Description of Artificial Sequence: primer
gacagtcctggtagtcagacaagaccttgt

SEQ ID NO: 1366 - DNA, 30 bp, Artificial Sequence
  Description of Artificial Sequence: primer
aaatacaacaatggccattggcaaaaggtt

SEQ ID NO: 1367 - DNA, 30 bp, Artificial Sequence
  Description of Artificial Sequence: primer
gacagtcctgttctggcagccattggttcc

SEQ ID NO: 1368 - DNA, 30 bp, Artificial Sequence
  Description of Artificial Sequence: primer
aaatacaacaatgtcaatttcaaagtactt

SEQ ID NO: 1369 - DNA, 30 bp, Artificial Sequence
  Description of Artificial Sequence: primer
gacagtcctggctcttaaactcattatttt

SEQ ID NO: 1370 - DNA, 30 bp, Artificial Sequence
  Description of Artificial Sequence: primer
aaatacaacaatgaccagtatgtcaattat

SEQ ID NO: 1371 - DNA, 30 bp, Artificial Sequence
  Description of Artificial Sequence: primer
gacagtcctgtgctacagaaaacctattgt

SEQ ID NO: 1372 - DNA, 30 bp, Artificial Sequence
  Description of Artificial Sequence: primer
aaatacaacaatgatgaggtatcaatggtg

SEQ ID NO: 1373 - DNA, 30 bp, Artificial Sequence
  Description of Artificial Sequence: primer
gacagtcctgttttgatttaaattcccatg

SEQ ID NO: 1374 - DNA, 30 bp, Artificial Sequence
  Description of Artificial Sequence: primer
aaatacaacaatgattcaaacgcaaagtac

SEQ ID NO: 1375 - DNA, 30 bp, Artificial Sequence
  Description of Artificial Sequence: primer
gacagtcctgttcaggtaagtacccttgta

SEQ ID NO: 1376 - DNA, 30 bp, Artificial Sequence
  Description of Artificial Sequence: primer
aaatacaacaatgtcttcgactgacgaaca

SEQ ID NO: 1377 - DNA, 30 bp, Artificial Sequence
  Description of Artificial Sequence: primer
gacagtcctgagacctcaaataatgtaata

SEQ ID NO: 1378 - DNA, 30 bp, Artificial Sequence
  Description of Artificial Sequence: primer
aaatacaacaatgtcgatgttaagaatctg

SEQ ID NO: 1379 - DNA, 30 bp, Artificial Sequence
  Description of Artificial Sequence: primer
gacagtcctgtctaaattcccatgtattcc

SEQ ID NO: 1380 - DNA, 30 bp, Artificial Sequence
  Description of Artificial Sequence: primer
aaatacaacaatgagtgaaacagtcaaaga

SEQ ID NO: 1381 - DNA, 30 bp, Artificial Sequence
  Description of Artificial Sequence: primer
gacagtcctgctcatcatccttgaaataga

SEQ ID NO: 1382 - DNA, 30 bp, Artificial Sequence
  Description of Artificial Sequence: primer
aaatacaacaatgaagagtactttgagttt

SEQ ID NO: 1383 - DNA, 30 bp, Artificial Sequence
  Description of Artificial Sequence: primer
gacagtcctgattgccgaagtcatggaact

SEQ ID NO: 1384 - DNA, 30 bp, Artificial Sequence
  Description of Artificial Sequence: primer
aaatacaacaatgcaattcaagaacgcttt

SEQ ID NO: 1385 - DNA, 30 bp, Artificial Sequence
  Description of Artificial Sequence: primer
gacagtcctggattttcttgatagagtcag

SEQ ID NO: 1386 - DNA, 30 bp, Artificial Sequence; identical to SEQ ID NO: 1204
  Description of Artificial Sequence: primer

SEQ ID NO: 1387 - DNA, 28 bp, Artificial Sequence
  Description of Artificial Sequence: primer
gacagtcctggtcgcgcacagcgaaaga

SEQ ID NO: 1388 - DNA, 30 bp, Artificial Sequence
  Description of Artificial Sequence: primer
aaatacaacaatgggcgaaggaactactaa

SEQ ID NO: 1389 - DNA, 30 bp, Artificial Sequence
  Description of Artificial Sequence: primer
gacagtcctgatcatgcatggcaaacgaga

SEQ ID NO: 1390 - DNA, 30 bp, Artificial Sequence
  Description of Artificial Sequence: primer
aaatacaacaatgatctctgaaaaggctgc

SEQ ID NO: 1391 - DNA, 30 bp, Artificial Sequence
  Description of Artificial Sequence: primer
gacagtcctgccccgtacagtccttttttt

SEQ ID NO: 1392 - DNA, 28 bp, Artificial Sequence
  Description of Artificial Sequence: primer
aaatacaacaatgtccgcctcagctcaa

SEQ ID NO: 1393 - DNA, 30 bp, Artificial Sequence
  Description of Artificial Sequence: primer
gacagtcctgttttttcaaaattaacaagg

SEQ ID NO: 1394 - DNA, 30 bp, Artificial Sequence
  Description of Artificial Sequence: primer
aaatacaacaatgttatcacactacatctt

SEQ ID NO: 1395 - DNA, 30 bp, Artificial Sequence
  Description of Artificial Sequence: primer
gacagtcctgagattccaaagctagaaagc

SEQ ID NO: 1396 - DNA, 30 bp, Artificial Sequence
  Description of Artificial Sequence: primer
aaatacaacaatgagatttcttcaggttta

SEQ ID NO: 1397 - DNA, 29 bp, Artificial Sequence
  Description of Artificial Sequence: primer
gacagtcctggttgattgaacaaagatcg

SEQ ID NO: 1398 - DNA, 30 bp, Artificial Sequence
  Description of Artificial Sequence: primer
aaatacaacaatggcgaagactatcaaagt

SEQ ID NO: 1399 - DNA, 30 bp, Artificial Sequence
  Description of Artificial Sequence: primer
gacagtcctgaaatacgccaattaatgaca

SEQ ID NO: 1400 - DNA, 30 bp, Artificial Sequence
  Description of Artificial Sequence: primer
aaatacaacaatgacaatttcgaataaatc

SEQ ID NO: 1401 - DNA, 30 bp, Artificial Sequence
  Description of Artificial Sequence: primer
gacagtcctgtgatttcttgtattccttat

SEQ ID NO: 1402 - DNA, 30 bp, Artificial Sequence
  Description of Artificial Sequence: primer
aaatacaacaatgagtgatcaagaatctgt

SEQ ID NO: 1403 - DNA, 30 bp, Artificial Sequence
  Description of Artificial Sequence: primer
gacagtcctgggttctacccatagattgta

SEQ ID NO: 1404 - DNA, 30 bp, Artificial Sequence
  Description of Artificial Sequence: primer
aaatacaacaatgagcaacaaatttacaat

SEQ ID NO: 1405 - DNA, 28 bp, Artificial Sequence
  Description of Artificial Sequence: primer
gacagtcctgacgcttttccattggatg

SEQ ID NO: 1406 - DNA, 30 bp, Artificial Sequence
  Description of Artificial Sequence: primer
aaatacaacaatgtaccacacccatatgca

SEQ ID NO: 1407 - DNA, 30 bp, Artificial Sequence
  Description of Artificial Sequence: primer
gacagtcctgactggtgctgtgactcgaat

SEQ ID NO: 1408 - DNA, 30 bp, Artificial Sequence
  Description of Artificial Sequence: primer
aaatacaacaatggcaggagcaacatcaag

SEQ ID NO: 1409 - DNA, 30 bp, Artificial Sequence
  Description of Artificial Sequence: primer
gacagtcctgtgtcttgaaagaacgggaaa

SEQ ID NO: 1410 - DNA, 30 bp, Artificial Sequence
  Description of Artificial Sequence: primer
aaatacaacaatgacaggtccaatagtgta

SEQ ID NO: 1411 - DNA, 30 bp, Artificial Sequence
  Description of Artificial Sequence: primer
gacagtcctgaaacttggtagatacgatag

SEQ ID NO: 1412 - DNA, 30 bp, Artificial Sequence
  Description of Artificial Sequence: primer
aaatacaacaatgtttgttcatcgtctctg

SEQ ID NO: 1413 - DNA, 30 bp, Artificial Sequence
  Description of Artificial Sequence: primer
gacagtcctgatcatcagaggcatcttcca

SEQ ID NO: 1414 - DNA, 30 bp, Artificial Sequence
  Description of Artificial Sequence: primer
aaatacaacaatgatacaatcagacgaaga

SEQ ID NO: 1415 - DNA, 30 bp, Artificial Sequence
  Description of Artificial Sequence: primer
gacagtcctggtgaaattgtgtaatagagg

SEQ ID NO: 1416 - DNA, 30 bp, Artificial Sequence
  Description of Artificial Sequence: primer
aaatacaacaatgaattttaaaatactcct

SEQ ID NO: 1417 - DNA, 30 bp, Artificial Sequence
  Description of Artificial Sequence: primer
gacagtcctgattagacaacaagtgcagta

SEQ ID NO: 1418 - DNA, 30 bp, Artificial Sequence
  Description of Artificial Sequence: primer
aaatacaacaatgaggaattttttcacgtt

SEQ ID NO: 1419 - DNA, 30 bp, Artificial Sequence
  Description of Artificial Sequence: primer
gacagtcctggttaaaattctggataccgt

SEQ ID NO: 1420 - DNA, 30 bp, Artificial Sequence
  Description of Artificial Sequence: primer
aaatacaacaatgaatagtactaatagtac

SEQ ID NO: 1421 - DNA, 30 bp, Artificial Sequence
  Description of Artificial Sequence: primer
gacagtcctgaaaaatagtaccattactta

SEQ ID NO: 1422 - DNA, 30 bp, Artificial Sequence
  Description of Artificial Sequence: primer
aaatacaacaatgtcacgaagtaacagtat

SEQ ID NO: 1423 - DNA, 30 bp, Artificial Sequence
  Description of Artificial Sequence: primer
gacagtcctgcttctgaccgtaacttagta

SEQ ID NO: 1424 - DNA, 30 bp, Artificial Sequence
  Description of Artificial Sequence: primer
aaatacaacaatgtcctacaaaaagtttgt

SEQ ID NO: 1425 - DNA, 29 bp, Artificial Sequence
  Description of Artificial Sequence: primer
gacagtcctgaaaagttgagggcatgagg

SEQ ID NO: 1426 - DNA, 30 bp, Artificial Sequence
  Description of Artificial Sequence: primer
aaatacaacaatgaagattttaacccaaga

SEQ ID NO: 1427 - DNA, 30 bp, Artificial Sequence
  Description of Artificial Sequence: primer
gacagtcctgcttccatcttctgtgctcat

SEQ ID NO: 1428 - DNA, 30 bp, Artificial Sequence
  Description of Artificial Sequence: primer
aaatacaacaatgaacagagtaggggcagt

SEQ ID NO: 1429 - DNA, 30 bp, Artificial Sequence
  Description of Artificial Sequence: primer
gacagtcctgattaaagtgcttgtcaaact

SEQ ID NO: 1430 - DNA, 30 bp, Artificial Sequence
  Description of Artificial Sequence: primer
aaatacaacaatgaagaaaaattcttcggt

SEQ ID NO: 1431 - DNA, 30 bp, Artificial Sequence
  Description of Artificial Sequence: primer
gacagtcctgtttccccaatatagacctag

SEQ ID NO: 1432 - DNA, 30 bp, Artificial Sequence
  Description of Artificial Sequence: primer
aaatacaacaatggaaagagtatggtttgc

SEQ ID NO: 1433 - DNA, 30 bp, Artificial Sequence
  Description of Artificial Sequence: primer
gacagtcctgcaaagaagtcagaaaactta

SEQ ID NO: 1434 - DNA, 30 bp, Artificial Sequence
  Description of Artificial Sequence: primer
aaatacaacaatggccaaagaagatactgg

SEQ ID NO: 1435 - DNA, 30 bp, Artificial Sequence
  Description of Artificial Sequence: primer
gacagtcctgcggtatgatgttatctaaga

SEQ ID NO: 1436 - DNA, 30 bp, Artificial Sequence
  Description of Artificial Sequence: primer
aaatacaacaatgaacgtttgcaagttgaa

SEQ ID NO: 1437 - DNA, 30 bp, Artificial Sequence
  Description of Artificial Sequence: primer
gacagtcctgtttacatgctttattgtcca

SEQ ID NO: 1438 - DNA, 30 bp, Artificial Sequence
  Description of Artificial Sequence: primer
aaatacaacaatgccattgaatgaaaaata

SEQ ID NO: 1439 - DNA, 28 bp, Artificial Sequence
  Description of Artificial Sequence: primer
gacagtcctgtggccaatcgttccacct

SEQ ID NO: 1440 - DNA, 30 bp, Artificial Sequence
  Description of Artificial Sequence: primer
aaatacaacaatgccttcttctttgacaaa

SEQ ID NO: 1441 - DNA, 30 bp, Artificial Sequence
  Description of Artificial Sequence: primer
gacagtcctgtttcttcaaagaggaccaat

SEQ ID NO: 1442 - DNA, 30 bp, Artificial Sequence
  Description of Artificial Sequence: primer
aaatacaacaatgcaagtactagtgacgct

SEQ ID NO: 1443 - DNA, 30 bp, Artificial Sequence
  Description of Artificial Sequence: primer
gacagtcctgagggcaaaactgcttccaac

SEQ ID NO: 1444 - DNA, 30 bp, Artificial Sequence
  Description of Artificial Sequence: primer
aaatacaacaatgtcttcagacaaatctat

SEQ ID NO: 1445 - DNA, 30 bp, Artificial Sequence
  Description of Artificial Sequence: primer
gacagtcctgcctttgttcattaacgtttt

SEQ ID NO: 1446 - DNA, 30 bp, Artificial Sequence
  Description of Artificial Sequence: primer
aaatacaacaatgacatcaaataattcgtt

SEQ ID NO: 1447 - DNA, 30 bp, Artificial Sequence
  Description of Artificial Sequence: primer
gacagtcctgagtttcaaacactgtattct

SEQ ID NO: 1448 - DNA, 26 bp, Artificial Sequence
  Description of Artificial Sequence: primer
aaatacaacaatggctcggggtgacg

SEQ ID NO: 1449 - DNA, 30 bp, Artificial Sequence
  Description of Artificial Sequence: primer
gacagtcctgagattttcttcttgctaaac

SEQ ID NO: 1450 - DNA, 30 bp, Artificial Sequence
  Description of Artificial Sequence: primer
aaatacaacaatgaacagacaggaatccat

SEQ ID NO: 1451 - DNA, 30 bp, Artificial Sequence
  Description of Artificial Sequence: primer
gacagtcctgatgtagagtggcgacaggaa

SEQ ID NO: 1452 - DNA, 30 bp, Artificial Sequence
  Description of Artificial Sequence: primer
aaatacaacaatgtctctggcacattattg

SEQ ID NO: 1453 - DNA, 30 bp, Artificial Sequence
  Description of Artificial Sequence: primer
gacagtcctgatcttcttgaggacaaggaa

SEQ ID NO: 1454 - DNA, 30 bp, Artificial Sequence
  Description of Artificial Sequence: primer
aaatacaacaatgacaatgcctcatcgcta

SEQ ID NO: 1455 - DNA, 30 bp, Artificial Sequence; identical to SEQ ID NO: 1453
  Description of Artificial Sequence: primer

SEQ ID NO: 1456 - DNA, 30 bp, Artificial Sequence
  Description of Artificial Sequence: primer
aaatacaacaatgcctttgaagtcgttttt

SEQ ID NO: 1457 - DNA, 30 bp, Artificial Sequence
  Description of Artificial Sequence: primer
gacagtcctgacaaagagtaaattcgtcga

SEQ ID NO: 1458 - DNA, 30 bp, Artificial Sequence
  Description of Artificial Sequence: primer
aaatacaacaatgcctgtggctgctcgata

SEQ ID NO: 1459 - DNA, 30 bp, Artificial Sequence
  Description of Artificial Sequence: primer
gacagtcctgatcatcatcggaacaagcac

SEQ ID NO: 1460 - DNA, 30 bp, Artificial Sequence
  Description of Artificial Sequence: primer
aaatacaacaatgaaattctctactctctc

SEQ ID NO: 1461 - DNA, 30 bp, Artificial Sequence
  Description of Artificial Sequence: primer
gacagtcctgtgtgctgatctcatgggtgg

SEQ ID NO: 1462 - DNA, 30 bp, Artificial Sequence
  Description of Artificial Sequence: primer
aaatacaacaatgaagaaacaaatattaat

SEQ ID NO: 1463 - DNA, 30 bp, Artificial Sequence
  Description of Artificial Sequence: primer
gacagtcctggttgatatactctagtagca

SEQ ID NO: 1464 - DNA, 30 bp, Artificial Sequence
  Description of Artificial Sequence: primer
aaatacaacaatgaacttgaagcagttcac

SEQ ID NO: 1465 - DNA, 29 bp, Artificial Sequence
  Description of Artificial Sequence: primer
gacagtcctgcgtcacggtaggcggatta

SEQ ID NO: 1466 - DNA, 30 bp, Artificial Sequence
  Description of Artificial Sequence: primer
aaatacaacaatgaaggaagagctcagcaa

SEQ ID NO: 1467 - DNA, 30 bp, Artificial Sequence
  Description of Artificial Sequence: primer
gacagtcctgcaagtcaaatgtagccgtag

SEQ ID NO: 1468 - DNA, 30 bp, Artificial Sequence
  Description of Artificial Sequence: primer
aaatacaacaatgatcaaatctacaattgc

SEQ ID NO: 1469 - DNA, 30 bp, Artificial Sequence
  Description of Artificial Sequence: primer
gacagtcctgccccactccaaacgatttta

SEQ ID NO: 1470 - DNA, 30 bp, Artificial Sequence
  Description of Artificial Sequence: primer
aaatacaacaatgaaattttctgcgtattt

SEQ ID NO: 1471 - DNA, 30 bp, Artificial Sequence
  Description of Artificial Sequence: primer
gacagtcctgctccaagagatgtcctatca

SEQ ID NO: 1472 - DNA, 30 bp, Artificial Sequence
  Description of Artificial Sequence: primer
aaatacaacaatgtctaccacactactttg

SEQ ID NO: 1473 - DNA, 30 bp, Artificial Sequence
  Description of Artificial Sequence: primer
gacagtcctgtgaacttgagtttccgttgt

SEQ ID NO: 1474 - DNA, 30 bp, Artificial Sequence
  Description of Artificial Sequence: primer
aaatacaacaatgaatcctcaagtcagtaa

SEQ ID NO: 1475 - DNA, 30 bp, Artificial Sequence
  Description of Artificial Sequence: primer
gacagtcctgaattctaatgtacatgatga

SEQ ID NO: 1476 - DNA, 30 bp, Artificial Sequence
  Description of Artificial Sequence: primer
aaatacaacaatgtcaggaaccggattatc

SEQ ID NO: 1477 - DNA, 30 bp, Artificial Sequence
  Description of Artificial Sequence: primer
gacagtcctgctctggtacactcaacctat

SEQ ID NO: 1478 - DNA, 30 bp, Artificial Sequence
  Description of Artificial Sequence: primer
aaatacaacaatgttgcgacttttttcact

SEQ ID NO: 1479 - DNA, 29 bp, Artificial Sequence
  Description of Artificial Sequence: primer
gacagtcctgtgctataccaaatcccacg

SEQ ID NO: 1480 - DNA, 30 bp, Artificial Sequence
  Description of Artificial Sequence: primer
aaatacaacaatgaagataacgtgtacaga

SEQ ID NO: 1481 - DNA, 30 bp, Artificial Sequence
  Description of Artificial Sequence: primer
gacagtcctggttatggtcattactatcca

SEQ ID NO: 1482 - DNA, 30 bp, Artificial Sequence
  Description of Artificial Sequence: primer
aaatacaacaatgaggttagctgtggttgt

SEQ ID NO: 1483 - DNA, 30 bp, Artificial Sequence
  Description of Artificial Sequence: primer
gacagtcctgttggtatatttcttcctctt

SEQ ID NO: 1484 - DNA, 30 bp, Artificial Sequence
  Description of Artificial Sequence: primer
aaatacaacaatgtccaatttatgtgtact

SEQ ID NO: 1485 - DNA, 30 bp, Artificial Sequence
  Description of Artificial Sequence: primer
gacagtcctggatagcatattctcccttat

SEQ ID NO: 1486 - DNA, 30 bp, Artificial Sequence
  Description of Artificial Sequence: primer
aaatacaacaatgtcattatattacacctt

SEQ ID NO: 1487 - DNA, 28 bp, Artificial Sequence
  Description of Artificial Sequence: primer
gacagtcctgtgtggaggatttgaacgg

SEQ ID NO: 1488 - DNA, 30 bp, Artificial Sequence
  Description of Artificial Sequence: primer
aaatacaacaatgtgttgctactgtgtttg

SEQ ID NO: 1489 - DNA, 29 bp, Artificial Sequence
  Description of Artificial Sequence: primer
gacagtcctgatcagatgaacaaggccca

SEQ ID NO: 1490 - DNA, 30 bp, Artificial Sequence
  Description of Artificial Sequence: primer
aaatacaacaatgttctcatattcagattt

SEQ ID NO: 1491 - DNA, 30 bp, Artificial Sequence
  Description of Artificial Sequence: primer
gacagtcctgtggagtctcatgtaaaattt

SEQ ID NO: 1492 - DNA, 30 bp, Artificial Sequence
  Description of Artificial Sequence: primer
aaatacaacaatgaatgtcatattttcttt

SEQ ID NO: 1493 - DNA, 30 bp, Artificial Sequence
  Description of Artificial Sequence: primer
gacagtcctgattaagcatgaagttgaacg

SEQ ID NO: 1494 - DNA, 30 bp, Artificial Sequence
  Description of Artificial Sequence: primer
aaatacaacaatgcgtatagcgatgcatct

SEQ ID NO: 1495 - DNA, 30 bp, Artificial Sequence
  Description of Artificial Sequence: primer
gacagtcctgatccttattgttaaaaacac

SEQ ID NO: 1496 - DNA, 30 bp, Artificial Sequence
  Description of Artificial Sequence: primer
aaatacaacaatgacatgcctaattttatg

SEQ ID NO: 1497 - DNA, 30 bp, Artificial Sequence
  Description of Artificial Sequence: primer
gacagtcctgatgcttatgatatacaccgg

SEQ ID NO: 1498 - DNA, 30 bp, Artificial Sequence
  Description of Artificial Sequence: primer
aaatacaacaatgagatcatctcttctaac

SEQ ID NO: 1499 - DNA, 27 bp, Artificial Sequence
  Description of Artificial Sequence: primer
gacagtcctgatccaacggatgacccg

SEQ ID NO: 1500 - DNA, 30 bp, Artificial Sequence
  Description of Artificial Sequence: primer
aaatacaacaatgaggttttctatgttaat

SEQ ID NO: 1501 - DNA, 30 bp, Artificial Sequence
  Description of Artificial Sequence: primer
gacagtcctgtggatatgtaacaattgttc

SEQ ID NO: 1502 - DNA, 30 bp, Artificial Sequence
  Description of Artificial Sequence: primer
aaatacaacaatgcggaccgattggaattt

SEQ ID NO: 1503 - DNA, 30 bp, Artificial Sequence
  Description of Artificial Sequence: primer
gacagtcctgaatcaactgcttaactggga

SEQ ID NO: 1504 - DNA, 30 bp, Artificial Sequence
  Description of Artificial Sequence: primer
aaatacaacaatgactgaattgtgtcctgt

SEQ ID NO: 1505 - DNA, 30 bp, Artificial Sequence
  Description of Artificial Sequence: primer
gacagtcctggttcttgaataataggtctg

SEQ ID NO: 1506 - DNA, 30 bp, Artificial Sequence
  Description of Artificial Sequence: primer
aaatacaacaatgatgatgttaattactat

SEQ ID NO: 1507 - DNA, 30 bp, Artificial Sequence
  Description of Artificial Sequence: primer
gacagtcctgccactccatagtaaaagaat

SEQ ID NO: 1508 - DNA, 30 bp, Artificial Sequence
  Description of Artificial Sequence: primer
aaatacaacaatgaacggttactggaaacc

SEQ ID NO: 1509 - DNA, 30 bp, Artificial Sequence
  Description of Artificial Sequence: primer
gacagtcctgattagagctgtttgaaagaa

SEQ ID NO: 1510 - DNA, 27 bp, Artificial Sequence
  Description of Artificial Sequence: primer
aaatacaacaatgcattgggcagcagc

SEQ ID NO: 1511 - DNA, 29 bp, Artificial Sequence
  Description of Artificial Sequence: primer
gacagtcctgaagatgggcctgaaaggct

SEQ ID NO: 1512 - DNA, 30 bp, Artificial Sequence
  Description of Artificial Sequence: primer
aaatacaacaatgggtgcttggttatttat

SEQ ID NO: 1513 - DNA, 27 bp, Artificial Sequence
  Description of Artificial Sequence: primer
gacagtcctgaccatgcaaggcggctt

SEQ ID NO: 1514 - DNA, 30 bp, Artificial Sequence
  Description of Artificial Sequence: primer
aaatacaacaatgtctagcaaatggtttaa

SEQ ID NO: 1515 - DNA, 30 bp, Artificial Sequence
  Description of Artificial Sequence: primer
gacagtcctgccctttctttaccaacatag

SEQ ID NO: 1516 - DNA, 30 bp, Artificial Sequence
  Description of Artificial Sequence: primer
aaatacaacaatgttttacaataggtggct

SEQ ID NO: 1517 - DNA, 29 bp, Artificial Sequence
  Description of Artificial Sequence: primer
gacagtcctgaccgggtccaccatttaac

SEQ ID NO: 1518 - DNA, 30 bp, Artificial Sequence
  Description of Artificial Sequence: primer
aaatacaacaatgaaacagcgtttttctca

SEQ ID NO: 1519 - DNA, 28 bp, Artificial Sequence
  Description of Artificial Sequence: primer
gacagtcctggaaaaacacgtctgagcc

SEQ ID NO: 1520 - DNA, 30 bp, Artificial Sequence
  Description of Artificial Sequence: primer
aaatacaacaatgcgtctacttcgaagaaa

SEQ ID NO: 1521 - DNA, 30 bp, Artificial Sequence
  Description of Artificial Sequence: primer
gacagtcctgagccctacgtccttttttgt

SEQ ID NO: 1522 - DNA, 30 bp, Artificial Sequence
  Description of Artificial Sequence: primer
aaatacaacaatgcaaactgtgttgaaata

SEQ ID NO: 1523 - DNA, 30 bp, Artificial Sequence
  Description of Artificial Sequence: primer
gacagtcctgtctctgtaacgaaacaaact

SEQ ID NO: 1524 - DNA, 30 bp, Artificial Sequence
  Description of Artificial Sequence: primer
aaatacaacaatgaaatataatatagtgca

SEQ ID NO: 1525 - DNA, 30 bp, Artificial Sequence
  Description of Artificial Sequence: primer
gacagtcctgttcacctgtgtctaaagctg

SEQ ID NO: 1526 - DNA, 30 bp, Artificial Sequence
  Description of Artificial Sequence: primer
aaatacaacaatgatgtcttgtctggtacc

SEQ ID NO: 1527 - DNA, 30 bp, Artificial Sequence
  Description of Artificial Sequence: primer
gacagtcctgtttatggcctgctttactta

SEQ ID NO: 1528 - DNA, 30 bp, Artificial Sequence
  Description of Artificial Sequence: primer
aaatacaacaatgctgttagaattgatttc

SEQ ID NO: 1529 - DNA, 30 bp, Artificial Sequence
  Description of Artificial Sequence: primer
gacagtcctgccttgtgagaaaccgtcttg

SEQ ID NO: 1530 - DNA, 30 bp, Artificial Sequence
  Description of Artificial Sequence: primer
aaatacaacaatgaaaatgaatctgaaaag

SEQ ID NO: 1531 - DNA, 28 bp, Artificial Sequence
  Description of Artificial Sequence: primer
gacagtcctgacacaaatcggcgctctc

SEQ ID NO: 1532 - DNA, 30 bp, Artificial Sequence
  Description of Artificial Sequence: primer
aaatacaacaatgtcgtttgtttccaagct

SEQ ID NO: 1533 - DNA, 30 bp, Artificial Sequence
  Description of Artificial Sequence: primer
gacagtcctgatctttaggtaacttgctga

SEQ ID NO: 1534 - DNA, 30 bp, Artificial Sequence
  Description of Artificial Sequence: primer
aaatacaacaatgctcaggtgtgcggtcaa

SEQ ID NO: 1535 - DNA, 29 bp, Artificial Sequence
  Description of Artificial Sequence: primer
gacagtcctgcacatatggcgtctttggc

SEQ ID NO: 1536 - DNA, 30 bp, Artificial Sequence
  Description of Artificial Sequence: primer
aaatacaacaatgaccagtttgtccaaaag

SEQ ID NO: 1537 - DNA, 27 bp, Artificial Sequence
  Description of Artificial Sequence: primer
gacagtcctgcccgcattccaaaccac

SEQ ID NO: 1538 - DNA, 30 bp, Artificial Sequence
  Description of Artificial Sequence: primer
aaatacaacaatgaggcaggtttggttctc

SEQ ID NO: 1539 - DNA, 30 bp, Artificial Sequence
  Description of Artificial Sequence: primer
gacagtcctgcgaattggcaagtaattggc

SEQ ID NO: 1540 - DNA, 30 bp, Artificial Sequence
  Description of Artificial Sequence: primer
aaatacaacaatgattggctccattgggtt

SEQ ID NO: 1541 - DNA, 30 bp, Artificial Sequence
  Description of Artificial Sequence: primer
gacagtcctgcccgatcttatcctcataat

SEQ ID NO: 1542 - DNA, 30 bp, Artificial Sequence
  Description of Artificial Sequence: primer
aaatacaacaatgctggagtttccaatatc

SEQ ID NO: 1543 - DNA, 30 bp, Artificial Sequence
  Description of Artificial Sequence: primer
gacagtcctgatacttgcttatctccccgt

SEQ ID NO: 1544 - DNA, 30 bp, Artificial Sequence
  Description of Artificial Sequence: primer
aaatacaacaatgttacagagtatagtcct

SEQ ID NO: 1545 - DNA, 30 bp, Artificial Sequence
  Description of Artificial Sequence: primer
gacagtcctggttgttgacggtaaatccag

SEQ ID NO: 1546 - DNA, 28 bp, Artificial Sequence
  Description of Artificial Sequence: primer
aaatacaacaatgactggcgaagaatgg

SEQ ID NO: 1547 - DNA, 30 bp, Artificial Sequence
  Description of Artificial Sequence: primer
gacagtcctgatgattaggcactagcagcc

SEQ ID NO: 1548 - DNA, 29 bp, Artificial Sequence
  Description of Artificial Sequence: primer
aaatacaacaatggctcaagccttgaact

SEQ ID NO: 1549 - DNA, 30 bp, Artificial Sequence
  Description of Artificial Sequence: primer
gacagtcctgacgtgacagtgttaactgcg

SEQ ID NO: 1550 - DNA, 30 bp, Artificial Sequence
  Description of Artificial Sequence: primer
aaatacaacaatgagtttatactttacgac

SEQ ID NO: 1551 - DNA, 30 bp, Artificial Sequence
  Description of Artificial Sequence: primer
gacagtcctgcttcgctgtcaattggttat

SEQ ID NO: 1552 - DNA, 30 bp, Artificial Sequence
  Description of Artificial Sequence: primer
aaatacaacaatgcgatcttatatgcagat

SEQ ID NO: 1553 - DNA, 30 bp, Artificial Sequence
  Description of Artificial Sequence: primer
gacagtcctgatatttgtattgagcaccac

SEQ ID NO: 1554 - DNA, 30 bp, Artificial Sequence
  Description of Artificial Sequence: primer
aaatacaacaatgaagctaggacatcgtga

SEQ ID NO: 1555 - DNA, 30 bp, Artificial Sequence
  Description of Artificial Sequence: primer
gacagtcctgttctggtttctctgatagca

SEQ ID NO: 1556 - DNA, 30 bp, Artificial Sequence
  Description of Artificial Sequence: primer
aaatacaacaatgataacactcttattata

SEQ ID NO: 1557 - DNA, 30 bp, Artificial Sequence
  Description of Artificial Sequence: primer
gacagtcctggaattgttcacttgattgta

SEQ ID NO: 1558 - DNA, 30 bp, Artificial Sequence
  Description of Artificial Sequence: primer
aaatacaacaatgtccattgtagcactaaa

SEQ ID NO: 1559 - DNA, 30 bp, Artificial Sequence
  Description of Artificial Sequence: primer
gacagtcctgtacgcgaggatctactgatt

SEQ ID NO: 1560 - DNA, 30 bp, Artificial Sequence
  Description of Artificial Sequence: primer
aaatacaacaatgcaggtgttacagttatg

SEQ ID NO: 1561 - DNA, 29 bp, Artificial Sequence
  Description of Artificial Sequence: primer
gacagtcctgaaaacaaacgtcgaatgcc

SEQ ID NO: 1562 - DNA, 30 bp, Artificial Sequence
  Description of Artificial Sequence: primer
aaatacaacaatgcaattcttcaaaacact

SEQ ID NO: 1563 - DNA, 30 bp, Artificial Sequence
  Description of Artificial Sequence: primer
gacagtcctgaatttcgggttcaaaagcca

SEQ ID NO: 1564 - DNA, 30 bp, Artificial Sequence
  Description of Artificial Sequence: primer
aaatacaacaatgtcattcaagtttctgat

SEQ ID NO: 1565 - DNA, 30 bp, Artificial Sequence
  Description of Artificial Sequence: primer
gacagtcctgatccatgttaagttcgtcag

SEQ ID NO: 1566 - DNA, 30 bp, Artificial Sequence
  Description of Artificial Sequence: primer
aaatacaacaatgtggtcgaaaaagtttac

SEQ ID NO: 1567 - DNA, 30 bp, Artificial Sequence
  Description of Artificial Sequence: primer
gacagtcctgaccatgctgataaatcaacg

SEQ ID NO: 1568 - DNA, 30 bp, Artificial Sequence
  Description of Artificial Sequence: primer
aaatacaacaatgatcgtcaatattagtgc

SEQ ID NO: 1569 - DNA, 30 bp, Artificial Sequence
  Description of Artificial Sequence: primer
gacagtcctgtagtgcatcgtatagtaatt

SEQ ID NO: 1570 - DNA, 30 bp, Artificial Sequence
  Description of Artificial Sequence: primer
aaatacaacaatgctacaattctcaacatt

SEQ ID NO: 1571 - DNA, 30 bp, Artificial Sequence
  Description of Artificial Sequence: primer
gacagtcctggcgagatttaatcgttcgag

SEQ ID NO: 1572 - DNA, 30 bp, Artificial Sequence
  Description of Artificial Sequence: primer
aaatacaacaatgtctagttcaatatttgg

SEQ ID NO: 1573 - DNA, 30 bp, Artificial Sequence
  Description of Artificial Sequence: primer
gacagtcctgtttgactctttgccaaatag

SEQ ID NO: 1574 - DNA, 30 bp, Artificial Sequence
  Description of Artificial Sequence: primer
aaatacaacaatgcgttggtctgtccttga

SEQ ID NO: 1575 - DNA, 30 bp, Artificial Sequence
  Description of Artificial Sequence: primer
gacagtcctgtgttctagggactactccag

SEQ ID NO: 1576 - DNA, 30 bp, Artificial Sequence
  Description of Artificial Sequence: primer
aaatacaacaatggtgccagaaaatagaag

SEQ ID NO: 1577 - DNA, 30 bp, Artificial Sequence
  Description of Artificial Sequence: primer
gacagtcctggccttcatttagcttcagtg

SEQ ID NO: 1578 - DNA, 30 bp, Artificial Sequence
  Description of Artificial Sequence: primer
aaatacaacaatgcgcgtttttactttgat

SEQ ID NO: 1579 - DNA, 30 bp, Artificial Sequence
  Description of Artificial Sequence: primer
gacagtcctgacagaaagtgtacttaccta

SEQ ID NO: 1580 - DNA, 30 bp, Artificial Sequence
  Description of Artificial Sequence: primer
aaatacaacaatgaattggctgtttttggt

SEQ ID NO: 1581 - DNA, 27 bp, Artificial Sequence
  Description of Artificial Sequence: primer
gacagtcctgggacgattttgcatccg

SEQ ID NO: 1582 - DNA, 30 bp, Artificial Sequence
  Description of Artificial Sequence: primer
aaatacaacaatgagaccacgtgaccaagg

SEQ ID NO: 1583 - DNA, 30 bp, Artificial Sequence
  Description of Artificial Sequence: primer
gacagtcctggaaagagtcattgttgcgta

SEQ ID NO: 1584 - DNA, 29 bp, Artificial Sequence
  Description of Artificial Sequence: primer
aaatacaacaatgtcaacgcaactcgcaa

SEQ ID NO: 1585 - DNA, 29 bp, Artificial Sequence
  Description of Artificial Sequence: primer
gacagtcctgaggaatcaaagacttcatg

SEQ ID NO: 1586 - DNA, 30 bp, Artificial Sequence
  Description of Artificial Sequence: primer
aaatacaacaatgatattacttcattttgt

SEQ ID NO: 1587 - DNA, 30 bp, Artificial Sequence
  Description of Artificial Sequence: primer
gacagtcctgaaggtacgacccattcattg

SEQ ID NO: 1588 - DNA, 30 bp, Artificial Sequence
  Description of Artificial Sequence: primer
aaatacaacaatgagagtaagaccaaagag

SEQ ID NO: 1589 - DNA, 30 bp, Artificial Sequence
  Description of Artificial Sequence: primer
gacagtcctgagataaatgaagcggttttt

SEQ ID NO: 1590 - DNA, 30 bp, Artificial Sequence
  Description of Artificial Sequence: primer
aaatacaacaatgaaagtgaggaaatatat

SEQ ID NO: 1591 - DNA, 30 bp, Artificial Sequence
  Description of Artificial Sequence: primer
gacagtcctgtaaatcatggacagataata

SEQ ID NO: 1592 - DNA, 30 bp, Artificial Sequence
  Description of Artificial Sequence: primer
aaatacaacaatgcaattacattcacttat

SEQ ID NO: 1593 - DNA, 30 bp, Artificial Sequence
  Description of Artificial Sequence: primer
gacagtcctgcgtatcacagcggctatatt

SEQ ID NO: 1594 - DNA, 30 bp, Artificial Sequence
  Description of Artificial Sequence: primer
aaatacaacaatgaaattatcaactgtcct

SEQ ID NO: 1595 - DNA, 30 bp, Artificial Sequence
  Description of Artificial Sequence: primer
gacagtcctgctctgttgaggtttcagttg

SEQ ID NO: 1596 - DNA, 30 bp, Artificial Sequence
  Description of Artificial Sequence: primer
aaatacaacaatgaaattatctgtcctcac

SEQ ID NO: 1597 - DNA, 30 bp, Artificial Sequence
  Description of Artificial Sequence: primer
gacagtcctgcgaataaaaactgttttgat

SEQ ID NO: 1598 - DNA, 30 bp, Artificial Sequence
  Description of Artificial Sequence: primer
aaatacaacaatgaaactgaaaactgtaag

SEQ ID NO: 1599 - DNA, 30 bp, Artificial Sequence
  Description of Artificial Sequence: primer
gacagtcctgttccaagtccaccgaataga

SEQ ID NO: 1600 - DNA, 30 bp, Artificial Sequence
  Description of Artificial Sequence: primer
aaatacaacaatgcaattacggaacatatt

SEQ ID NO: 1601 - DNA, 30 bp, Artificial Sequence
  Description of Artificial Sequence: primer
gacagtcctgattggaagagttactactga

SEQ ID NO: 1602 - DNA, 30 bp, Artificial Sequence
  Description of Artificial Sequence: primer
aaatacaacaatgaagttgcagagtttgtt

SEQ ID NO: 1603 - DNA, 30 bp, Artificial Sequence
  Description of Artificial Sequence: primer
gacagtcctgctccttggtgtatgcatctc

SEQ ID NO: 1604 - DNA, 30 bp, Artificial Sequence
  Description of Artificial Sequence: primer
aaatacaacaatgatagtgtggcaagcact

SEQ ID NO: 1605 - DNA, 30 bp, Artificial Sequence
  Description of Artificial Sequence: primer
gacagtcctgttcataaatgctatccgaat

SEQ ID NO: 1606 - DNA, 30 bp, Artificial Sequence
  Description of Artificial Sequence: primer
aaatacaacaatgatacgtccattatgttc

SEQ ID NO: 1607 - DNA, 28 bp, Artificial Sequence
  Description of Artificial Sequence: primer
gacagtcctgttcgctgttgccatcatt

SEQ ID NO: 1608 - DNA, 30 bp, Artificial Sequence
  Description of Artificial Sequence: primer
aaatacaacaatgaggtttctttcaaaaag

SEQ ID NO: 1609 - DNA, 30 bp, Artificial Sequence
  Description of Artificial Sequence: primer
gacagtcctgatcatgatcaggaagttcat

SEQ ID NO: 1610 - DNA, 30 bp, Artificial Sequence
  Description of Artificial Sequence: primer
aaatacaacaatgtctgtgcaccacaaaaa

SEQ ID NO: 1611 - DNA, 30 bp, Artificial Sequence
  Description of Artificial Sequence: primer
gacagtcctgcttttccttctttccatcgt

SEQ ID NO: 1612 - DNA, 28 bp, Artificial Sequence
  Description of Artificial Sequence: primer
aaatacaacaatggcacacatcccagag

SEQ ID NO: 1613 - DNA, 30 bp, Artificial Sequence
  Description of Artificial Sequence: primer
gacagtcctgctcaaccgtggtcctgtatg

SEQ ID NO: 1614 - DNA, 30 bp, Artificial Sequence
  Description of Artificial Sequence: primer
aaatacaacaatgaataaactattgttaca

SEQ ID NO: 1615 - DNA, 30 bp, Artificial Sequence
  Description of Artificial Sequence: primer
gacagtcctgttggaatgttatattttgct

SEQ ID NO: 1616 - DNA, 30 bp, Artificial Sequence
  Description of Artificial Sequence: primer
aaatacaacaatgtccgtttccaagattgc

SEQ ID NO: 1617 - DNA, 30 bp, Artificial Sequence
  Description of Artificial Sequence: primer
gacagtcctgactgttgccagtttctagac

SEQ ID NO: 1618 - DNA, 30 bp, Artificial Sequence
  Description of Artificial Sequence: primer
aaatacaacaatgcgtctctctaacctaat

SEQ ID NO: 1619 - DNA, 29 bp, Artificial Sequence
  Description of Artificial Sequence: primer
gacagtcctgagttgaagcggcaccatta

SEQ ID NO: 1620 - DNA, 30 bp, Artificial Sequence
  Description of Artificial Sequence: primer
aaatacaacaatgcaattcaaaaacgtcgc

SEQ ID NO: 1621 - DNA, 30 bp, Artificial Sequence
  Description of Artificial Sequence: primer
gacagtcctggtctctcttagcttttgaag

SEQ ID NO: 1622 - DNA, 30 bp, Artificial Sequence
  Description of Artificial Sequence: primer
aaatacaacaatgcaattctctactgtcgc

SEQ ID NO: 1623 - DNA, 30 bp, Artificial Sequence
  Description of Artificial Sequence: primer
gacagtcctgattttcagtttgttgagaga

SEQ ID NO: 1624 - DNA, 30 bp, Artificial Sequence
  Description of Artificial Sequence: primer
aaatacaacaatgcaattttctactgtcgc

SEQ ID NO: 1625 - DNA, 30 bp, Artificial Sequence
  Description of Artificial Sequence: primer
gacagtcctgagaggtggtgttctttggag

SEQ ID NO: 1626 - DNA, 30 bp, Artificial Sequence
  Description of Artificial Sequence: primer
aaatacaacaatgaagttctcttctgttac

SEQ ID NO: 1627 - DNA, 30 bp, Artificial Sequence
  Description of Artificial Sequence: primer
gacagtcctgggacttggaagtcttgttga

SEQ ID NO: 1628 - DNA, 30 bp, Artificial Sequence
  Description of Artificial Sequence: primer
aaatacaacaatggctagcttgaaggtatt

SEQ ID NO: 1629 - DNA, 30 bp, Artificial Sequence
  Description of Artificial Sequence: primer
gacagtcctgttgctcttctagcttgcgtg

SEQ ID NO: 1630 - DNA, 30 bp, Artificial Sequence
  Description of Artificial Sequence: primer
aaatacaacaatgtttaaatctgttgttta

SEQ ID NO: 1631 - DNA, 30 bp, Artificial Sequence
  Description of Artificial Sequence: primer
gacagtcctgttcacaaccttcaggcaaat

SEQ ID NO: 1632 - DNA, 30 bp, Artificial Sequence
  Description of Artificial Sequence: primer
aaatacaacaatgaactcatttgcgtcatt

SEQ ID NO: 1633 - DNA, 30 bp, Artificial Sequence
  Description of Artificial Sequence: primer
gacagtcctgagaagttatcaatgaggaag

SEQ ID NO: 1634 - DNA, 30 bp, Artificial Sequence
  Description of Artificial Sequence: primer
aaatacaacaatgaaattgtcttccgcttt

SEQ ID NO: 1635 - DNA, 30 bp, Artificial Sequence
  Description of Artificial Sequence: primer
gacagtcctgttcagttactgcggaggtta

SEQ ID NO: 1636 - DNA, 30 bp, Artificial Sequence
  Description of Artificial Sequence: primer
aaatacaacaatggcaatcgttaatagttg

SEQ ID NO: 1637 - DNA, 30 bp, Artificial Sequence
  Description of Artificial Sequence: primer
gacagtcctgacatgaatcatgactaaacg

SEQ ID NO: 1638 - DNA, 30 bp, Artificial Sequence
  Description of Artificial Sequence: primer
aaatacaacaatggcttacactaagatcgc

SEQ ID NO: 1639 - DNA, 30 bp, Artificial Sequence
  Description of Artificial Sequence: primer
gacagtcctgactgcttaaggaaaatccag

SEQ ID NO: 1640 - DNA, 30 bp, Artificial Sequence
  Description of Artificial Sequence: primer
aaatacaacaatgatttcacccataagctt

SEQ ID NO: 1641 - DNA, 30 bp, Artificial Sequence
  Description of Artificial Sequence: primer
gacagtcctgttcggtagtagtggagtaaa

SEQ ID NO: 1642 - DNA, 30 bp, Artificial Sequence
  Description of Artificial Sequence: primer
aaatacaacaatgcagttacttcgctgttt

SEQ ID NO: 1643 - DNA, 29 bp, Artificial Sequence
  Description of Artificial Sequence: primer
gacagtcctgcttcccgttggccaaaata

SEQ ID NO: 1644 - DNA, 30 bp, Artificial Sequence
  Description of Artificial Sequence: primer
aaatacaacaatgaaagtgcttgacctact

SEQ ID NO: 1645 - DNA, 30 bp, Artificial Sequence
  Description of Artificial Sequence: primer
gacagtcctgtttggatgaagatgagaaat

SEQ ID NO: 1646 - DNA, 30 bp, Artificial Sequence
  Description of Artificial Sequence: primer
aaatacaacaatgcgtttctctactacact

SEQ ID NO: 1647 - DNA, 30 bp, Artificial Sequence
  Description of Artificial Sequence: primer
gacagtcctggttttgcaaagtgttacaat

SEQ ID NO: 1648 - DNA, 30 bp, Artificial Sequence
  Description of Artificial Sequence: primer
aaatacaacaatgaaattcacatcagtgct

SEQ ID NO: 1649 - DNA, 30 bp, Artificial Sequence
  Description of Artificial Sequence: primer
gacagtcctgggaagacgattcgctttgta

SEQ ID NO: 1650 - DNA, 30 bp, Artificial Sequence
  Description of Artificial Sequence: primer
aaatacaacaatgaaatttaatttttctac

SEQ ID NO: 1651 - DNA, 26 bp, Artificial Sequence
  Description of Artificial Sequence: primer
gacagtcctgccttgccggcgcaaga

SEQ ID NO: 1652 - DNA, 30 bp, Artificial Sequence
  Description of Artificial Sequence: primer
aaatacaacaatgcaaagaccatttctact

SEQ ID NO: 1653 - DNA, 30 bp, Artificial Sequence
  Description of Artificial Sequence: primer
gacagtcctggtcaatattttctttacctt

SEQ ID NO: 1654 - DNA, 30 bp, Artificial Sequence
  Description of Artificial Sequence: primer
aaatacaacaatgcaatacaaaaagacttt

SEQ ID NO: 1655 - DNA, 30 bp, Artificial Sequence
  Description of Artificial Sequence: primer
gacagtcctgagatgatgcgctggatgtag

SEQ ID NO: 1656 - DNA, 30 bp, Artificial Sequence
  Description of Artificial Sequence: primer
aaatacaacaatgaaattctccactgcttt

SEQ ID NO: 1657 - DNA, 30 bp, Artificial Sequence
  Description of Artificial Sequence: primer
gacagtcctgatcgctctcagaaccttctt

SEQ ID NO: 1658 - DNA, 30 bp, Artificial Sequence
  Description of Artificial Sequence: primer
aaatacaacaatgcaatataaaaagccatt

SEQ ID NO: 1659 - DNA, 30 bp, Artificial Sequence
  Description of Artificial Sequence: primer
gacagtcctgtctctttgctttagatgagg

SEQ ID NO: 1660 - DNA, 30 bp, Artificial Sequence
  Description of Artificial Sequence: primer
aaatacaacaatgcaatacaaaaaatcatt

SEQ ID NO: 1661 - DNA, 30 bp, Artificial Sequence
  Description of Artificial Sequence: primer
gacagtcctgcttggaggaagcagtagtgg

SEQ ID NO: 1662 - DNA, 30 bp, Artificial Sequence
  Description of Artificial Sequence: primer
aaatacaacaatgagatctttaaataccct

SEQ ID NO: 1663 - DNA, 30 bp, Artificial Sequence
  Description of Artificial Sequence: primer
gacagtcctgatcatttacggttaatccca

SEQ ID NO: 1664 - DNA, 30 bp, Artificial Sequence
  Description of Artificial Sequence: primer
aaatacaacaatgtcactcctttacatcat

SEQ ID NO: 1665 - DNA, 30 bp, Artificial Sequence
  Description of Artificial Sequence: primer
gacagtcctgatcagcatcagaagattcac

SEQ ID NO: 1666 - DNA, 30 bp, Artificial Sequence
  Description of Artificial Sequence: primer
aaatacaacaatgcgtgccaccactttatt

SEQ ID NO: 1667 - DNA, 30 bp, Artificial Sequence
  Description of Artificial Sequence: primer
gacagtcctgggagttttcgtgttcacagt

SEQ ID NO: 1668 - DNA, 30 bp, Artificial Sequence
  Description of Artificial Sequence: primer
aaatacaacaatgcgtttttcaaatttcct

SEQ ID NO: 1669 - DNA, 28 bp, Artificial Sequence
  Description of Artificial Sequence: primer
gacagtcctgagtttcgccgctgttacc

SEQ ID NO: 1670 - DNA, 28 bp, Artificial Sequence
  Description of Artificial Sequence: primer
aaatacaacaatgaaactgtccgccacc

SEQ ID NO: 1671 - DNA, 30 bp, Artificial Sequence
  Description of Artificial Sequence: primer
gacagtcctgctcagaagaagaagcaactt

SEQ ID NO: 1672 - DNA, 30 bp, Artificial Sequence
  Description of Artificial Sequence: primer
aaatacaacaatggtgagaaatcgttttat

SEQ ID NO: 1673 - DNA, 30 bp, Artificial Sequence
  Description of Artificial Sequence: primer
gacagtcctggctctgctttatattctcat

SEQ ID NO: 1674 - DNA, 30 bp, Artificial Sequence
  Description of Artificial Sequence: primer
aaatacaacaatgcaattatatctgacact

SEQ ID NO: 1675 - DNA, 30 bp, Artificial Sequence
  Description of Artificial Sequence: primer
gacagtcctgcgattgtgcaacataaggct

SEQ ID NO: 1676 - DNA, 30 bp, Artificial Sequence
  Description of Artificial Sequence: primer
aaatacaacaatggcttacatcaagatcgc

SEQ ID NO: 1677 - DNA, 30 bp, Artificial Sequence
  Description of Artificial Sequence: primer
gacagtcctgagatgaagaatcttcagcca

SEQ ID NO: 1678 - DNA, 28 bp, Artificial Sequence
  Description of Artificial Sequence: primer
aaatacaacaatggtttcgttcagaggg

SEQ ID NO: 1679 - DNA, 30 bp, Artificial Sequence
  Description of Artificial Sequence: primer
gacagtcctgtttttcattgatggcttgat

SEQ ID NO: 1680 - DNA, 30 bp, Artificial Sequence
  Description of Artificial Sequence: primer
aaatacaacaatgttgaagtcagccgttta

SEQ ID NO: 1681 - DNA, 28 bp, Artificial Sequence
  Description of Artificial Sequence: primer
gacagtcctgttcacaactttccggcaa

SEQ ID NO: 1682 - DNA, 30 bp, Artificial Sequence
  Description of Artificial Sequence: primer
aaatacaacaatgtttaagtctgttgttta

SEQ ID NO: 1683 - DNA, 30 bp, Artificial Sequence
  Description of Artificial Sequence: primer
gacagtcctgttcacaaccttcaggcaagt

SEQ ID NO: 1684 - DNA, 30 bp, Artificial Sequence
  Description of Artificial Sequence: primer
aaatacaacaatggtcaaactaacttcaat

SEQ ID NO: 1685 - DNA, 30 bp, Artificial Sequence
  Description of Artificial Sequence: primer
gacagtcctggtaggtttcagttggatgag

SEQ ID NO: 1686 - DNA, 30 bp, Artificial Sequence
  Description of Artificial Sequence: primer
aaatacaacaatgcaattctctaccgtcgc

SEQ ID NO: 1687 - DNA, 30 bp, Artificial Sequence
  Description of Artificial Sequence: primer
gacagtcctgggaaactgtttcagaacaaa

SEQ ID NO: 1688 - DNA, 30 bp, Artificial Sequence
  Description of Artificial Sequence: primer
aaatacaacaatgcaaccatctaccgctac

SEQ ID NO: 1689 - DNA, 30 bp, Artificial Sequence
  Description of Artificial Sequence: primer
gacagtcctgagcaataacacatgctgggt

SEQ ID NO: 1690 - DNA, 30 bp, Artificial Sequence
  Description of Artificial Sequence: primer
aaatacaacaatgagcttacccgatggatt

SEQ ID NO: 1691 - DNA, 27 bp, Artificial Sequence
  Description of Artificial Sequence: primer
gacagtcctgcgtctcggtgcgcttgt

SEQ ID NO: 1692 - DNA, 30 bp, Artificial Sequence
  Description of Artificial Sequence: primer
aaatacaacaatgtctataccccattccgt

SEQ ID NO: 1693 - DNA, 30 bp, Artificial Sequence
  Description of Artificial Sequence: primer
gacagtcctgcttctttgtattggagtatt

SEQ ID NO: 1694 - DNA, 30 bp, Artificial Sequence
  Description of Artificial Sequence: primer
aaatacaacaatgaaattcatttctacctt

SEQ ID NO: 1695 - DNA, 30 bp, Artificial Sequence
  Description of Artificial Sequence: primer
gacagtcctgagtggtgttttgctcttttt

SEQ ID NO: 1696 - DNA, 30 bp, Artificial Sequence
  Description of Artificial Sequence: primer
aaatacaacaatgtctgcaattaatcatct

SEQ ID NO: 1697 - DNA, 30 bp, Artificial Sequence
  Description of Artificial Sequence: primer
gacagtcctgatctaaggttgttgcgtaat

SEQ ID NO: 1698 - DNA, 29 bp, Artificial Sequence
  Description of Artificial Sequence: primer
aaatacaacaatgcttttgcaagctttcc

SEQ ID NO: 1699 - DNA, 30 bp, Artificial Sequence
  Description of Artificial Sequence: primer
gacagtcctgggtgtcatttgggttgtatt

SEQ ID NO: 1700 - DNA, 30 bp, Artificial Sequence
  Description of Artificial Sequence: primer
aaatacaacaatgcgtttacaaagaaattc

SEQ ID NO: 1701 - DNA, 30 bp, Artificial Sequence
  Description of Artificial Sequence: primer
gacagtcctggttgttattaggaccagtac

SEQ ID NO: 1702 - DNA, 30 bp, Artificial Sequence
  Description of Artificial Sequence: primer
aaatacaacaatggcacaagatatagataa

SEQ ID NO: 1703 - DNA, 30 bp, Artificial Sequence
  Description of Artificial Sequence: primer
gacagtcctgtgactgtgttaaacatgtgt

SEQ ID NO: 1704 - DNA, 30 bp, Artificial Sequence
  Description of Artificial Sequence: primer
aaatacaacaatgtctagaattagtatatt

SEQ ID NO: 1705 - DNA, 30 bp, Artificial Sequence
  Description of Artificial Sequence: primer
gacagtcctggtatgtttcagtcttatgca

SEQ ID NO: 1706 - DNA, 30 bp, Artificial Sequence
  Description of Artificial Sequence: primer
aaatacaacaatggttaatataagcatcgt

SEQ ID NO: 1707 - DNA, 30 bp, Artificial Sequence
  Description of Artificial Sequence: primer
gacagtcctgttccgaaggatatgtttcag

SEQ ID NO: 1708 - DNA, 30 bp, Artificial Sequence; identical to SEQ ID NO: 1684
  Description of Artificial Sequence: primer

SEQ ID NO: 1709 - DNA, 30 bp, Artificial Sequence
  Description of Artificial Sequence: primer
gacagtcctggtaagtttcagttggatgag

SEQ ID NO: 1710 - DNA, 30 bp, Artificial Sequence
  Description of Artificial Sequence: primer
aaatacaacaatgaggtttttgaggggatt

SEQ ID NO: 1711 - DNA, 30 bp, Artificial Sequence
  Description of Artificial Sequence: primer
gacagtcctgagtctctggagtgtaatctt

SEQ ID NO: 1712 - DNA, 30 bp, Artificial Sequence
  Description of Artificial Sequence: primer
aaatacaacaatgctttcgcttaaaacgtt

SEQ ID NO: 1713 - DNA, 27 bp, Artificial Sequence
  Description of Artificial Sequence: primer
gacagtcctgttctccgagggaaccgt

SEQ ID NO: 1714 - DNA, 28 bp, Artificial Sequence
  Description of Artificial Sequence: primer
aaatacaacaatgcaaccgatcaccact

SEQ ID NO: 1715 - DNA, 27 bp, Artificial Sequence
  Description of Artificial Sequence: primer
gacagtcctgagcgataacacaggcgg

SEQ ID NO: 1716 - DNA, 30 bp, Artificial Sequence
  Description of Artificial Sequence: primer
aaatacaacaatgaagttccaagttgtttt

SEQ ID NO: 1717 - DNA, 29 bp, Artificial Sequence
  Description of Artificial Sequence: primer
gacagtcctgttgactgctttcggcagta

SEQ ID NO: 1718 - DNA, 30 bp, Artificial Sequence
  Description of Artificial Sequence: primer
aaatacaacaatgttactacgttctcttac

SEQ ID NO: 1719 - DNA, 30 bp, Artificial Sequence
  Description of Artificial Sequence: primer
gacagtcctgatcagtcaagttagaagaac

SEQ ID NO: 1720 - DNA, 30 bp, Artificial Sequence
  Description of Artificial Sequence: primer
aaatacaacaatgagatttccttcaatttt

SEQ ID NO: 1721 - DNA, 30 bp, Artificial Sequence
  Description of Artificial Sequence: primer
gacagtcctggttatttgtgctgttggaaa

SEQ ID NO: 1722 - DNA, 30 bp, Artificial Sequence
  Description of Artificial Sequence: primer
aaatacaacaatgttgaatagttcaagaaa

SEQ ID NO: 1723 - DNA, 30 bp, Artificial Sequence
  Description of Artificial Sequence: primer
gacagtcctgtctggaaaattgaaaaaacc

SEQ ID NO: 1724 - DNA, 28 bp, Artificial Sequence
  Description of Artificial Sequence: primer
aaatacaacaatgaaaacggcctacttg

SEQ ID NO: 1725 - DNA, 30 bp, Artificial Sequence
  Description of Artificial Sequence: primer
gacagtcctgtttctttgacgattttcgta

SEQ ID NO: 1726 - DNA, 30 bp, Artificial Sequence
  Description of Artificial Sequence: primer
aaatacaacaatgggtgtttgcactatttt

SEQ ID NO: 1727 - DNA, 30 bp, Artificial Sequence
  Description of Artificial Sequence: primer
gacagtcctgataggtatctaggctggtgt

SEQ ID NO: 1728 - DNA, 30 bp, Artificial Sequence
  Description of Artificial Sequence: primer
aaatacaacaatggtccttttgaaatggct

SEQ ID NO: 1729 - DNA, 30 bp, Artificial Sequence
  Description of Artificial Sequence: primer
gacagtcctgattctctaaaggatcgtgtg

SEQ ID NO: 1730 - DNA, 30 bp, Artificial Sequence
  Description of Artificial Sequence: primer
aaatacaacaatgaagttttctgctggtgc

SEQ ID NO: 1731 - DNA, 30 bp, Artificial Sequence
  Description of Artificial Sequence: primer
gacagtcctggtcgtgcgactgaatgtact

SEQ ID NO: 1732 - DNA, 30 bp, Artificial Sequence
  Description of Artificial Sequence: primer
aaatacaacaatgtggttgaaatccttgct

SEQ ID NO: 1733 - DNA, 30 bp, Artificial Sequence
  Description of Artificial Sequence: primer
gacagtcctgagtaccgtacaactcaaaag

SEQ ID NO: 1734 - DNA, 30 bp, Artificial Sequence
  Description of Artificial Sequence: primer
aaatacaacaatgagtgtgataggtaggtt

SEQ ID NO: 1735 - DNA, 28 bp, Artificial Sequence
  Description of Artificial Sequence: primer
gacagtcctgacaacgcgcagtaatcca

SEQ ID NO: 1736 - DNA, 30 bp, Artificial Sequence
  Description of Artificial Sequence: primer
aaatacaacaatgccaagagtagctatcat

SEQ ID NO: 1737 - DNA, 30 bp, Artificial Sequence
  Description of Artificial Sequence: primer
gacagtcctgatcatattctgtcaacgtat

SEQ ID NO: 1738 - DNA, 27 bp, Artificial Sequence
  Description of Artificial Sequence: primer
aaatacaacaatgcttgtgcggctgtt

SEQ ID NO: 1739 - DNA, 30 bp, Artificial Sequence
  Description of Artificial Sequence: primer
gacagtcctgttcaatctgggcattcaaac

SEQ ID NO: 1740 - DNA, 30 bp, Artificial Sequence
  Description of Artificial Sequence: primer
aaatacaacaatgcaagctaaaattatata

SEQ ID NO: 1741 - DNA, 30 bp, Artificial Sequence
  Description of Artificial Sequence: primer
gacagtcctgatatcccgagttcatgacag

SEQ ID NO: 1742 - DNA, 29 bp, Artificial Sequence
  Description of Artificial Sequence: primer
aaatacaacaatgctggtagtgggattga

SEQ ID NO: 1743 - DNA, 30 bp, Artificial Sequence
  Description of Artificial Sequence: primer
gacagtcctgtttgtccttgaagtataaca

SEQ ID NO: 1744 - DNA, 30 bp, Artificial Sequence
  Description of Artificial Sequence: primer
aaatacaacaatggtgagcatgttctcatt

SEQ ID NO: 1745 - DNA, 30 bp, Artificial Sequence
  Description of Artificial Sequence: primer
gacagtcctgctcatctgaaccatcaggac

SEQ ID NO: 1746 - DNA, 30 bp, Artificial Sequence
  Description of Artificial Sequence: primer
aaatacaacaatgtctagtgtaccttataa

SEQ ID NO: 1747 - DNA, 30 bp, Artificial Sequence
  Description of Artificial Sequence: primer
gacagtcctgggagttgatgctagaaccag

SEQ ID NO: 1748 - DNA, 30 bp, Artificial Sequence
  Description of Artificial Sequence: primer
aaatacaacaatgagtggagtatcaaataa

SEQ ID NO: 1749 - DNA, 30 bp, Artificial Sequence
  Description of Artificial Sequence: primer
gacagtcctggttgtaccatggggtatttc

SEQ ID NO: 1750 - DNA, 30 bp, Artificial Sequence
  Description of Artificial Sequence: primer
aaatacaacaatgaagcttcaatttttttc

SEQ ID NO: 1751 - DNA, 30 bp, Artificial Sequence
  Description of Artificial Sequence: primer
gacagtcctgaattctaccaatttgtttat

SEQ ID NO: 1752 - DNA, 30 bp, Artificial Sequence
  Description of Artificial Sequence: primer
aaatacaacaatgcaagtgaccacaagatt

SEQ ID NO: 1753 - DNA, 30 bp, Artificial Sequence
  Description of Artificial Sequence: primer
gacagtcctgatgagattcgatgaatgatt

SEQ ID NO: 1754 - DNA, 30 bp, Artificial Sequence
  Description of Artificial Sequence: primer
aaatacaacaatgatgtttaatatttacct

SEQ ID NO: 1755 - DNA, 30 bp, Artificial Sequence
  Description of Artificial Sequence: primer
gacagtcctgtcttgaataacttgagtcaa

SEQ ID NO: 1756 - DNA, 30 bp, Artificial Sequence
  Description of Artificial Sequence: primer
aaatacaacaatgaagtataataacagaaa

SEQ ID NO: 1757 - DNA, 30 bp, Artificial Sequence
  Description of Artificial Sequence: primer
gacagtcctgatctttgttgccttggtaat

SEQ ID NO: 1758 - DNA, 30 bp, Artificial Sequence
  Description of Artificial Sequence: primer
aaatacaacaatgccagtctctgtaataac

SEQ ID NO: 1759 - DNA, 27 bp, Artificial Sequence
  Description of Artificial Sequence: primer
gacagtcctgactgccattgtcctccg

SEQ ID NO: 1760 - DNA, 30 bp, Artificial Sequence
  Description of Artificial Sequence: primer
aaatacaacaatgcaagatttagagatttt

SEQ ID NO: 1761 - DNA, 30 bp, Artificial Sequence
  Description of Artificial Sequence: primer
gacagtcctgctgcaagtaaggaacatcgc

SEQ ID NO: 1762 - DNA, 30 bp, Artificial Sequence
  Description of Artificial Sequence: primer
aaatacaacaatgtcaaagatagattcagt

SEQ ID NO: 1763 - DNA, 30 bp, Artificial Sequence
  Description of Artificial Sequence: primer
gacagtcctgtttactttcgttaattgcgt

SEQ ID NO: 1764 - DNA, 30 bp, Artificial Sequence
  Description of Artificial Sequence: primer
aaatacaacaatgcttatttcaaaatctaa

SEQ ID NO: 1765 - DNA, 30 bp, Artificial Sequence
  Description of Artificial Sequence: primer
gacagtcctgactttcatggacatatctgg

SEQ ID NO: 1766 - DNA, 30 bp, Artificial Sequence
  Description of Artificial Sequence: primer
aaatacaacaatgtctaggaagttgtccca

SEQ ID NO: 1767 - DNA, 30 bp, Artificial Sequence
  Description of Artificial Sequence: primer
gacagtcctgatcacgtaaattatgcaatt

SEQ ID NO: 1768 - DNA, 267 bp, Saccharomyces cerevisiae
  CDS (1)..(267)
atgagatttccttcaatttttactgctgttttattcgcagcatcctccgcattagctgctccagtcaacactacaacagaagatgaaacggcacaaattccggctgaagctgtcatcggttactcagatttagaaggggatttcgatgttgctgttttgccattttccaacagcacaaataacgggttattgtttataaatactactattgccagcattgctgctaaagaagaaggggtatctctcgagaaaagagaggctgaagct

SEQ ID NO: 1769 - protein, 89 aa, Saccharomyces cerevisiae
MRFPSIFTAVLFAASSALAAPVNTTTEDETAQIPAEAVIGYSDLEGDFDVAVLPFSNSTNNGLLFINTTIASIAAKEEGVSLEKREAEA

SEQ ID NO: 1770 - DNA, 108 bp, M28 virus
atggaatctgtttcttctttgtttaatattttttctactattatggttaattataaatctttggttttggctttgttgtctgtttctaatttgaaatatgctagaggt

SEQ ID NO: 1771 - protein, 36 aa, M28 virus
MESVSSLFNIFSTIMVNYKSLVLALLSVSNLKYARG

SEQ ID NO: 1772 - DNA, 30 bp, Artificial Sequence; identical to SEQ ID NO: 1720
  Description of Artificial Sequence: primer

SEQ ID NO: 1773 - DNA, 30 bp, Artificial Sequence
  Description of Artificial Sequence: primer
gacagtcctgagcttcagcctctcttttct

SEQ ID NO: 1774 - DNA, 82 bp, Artificial Sequence
  Description of Artificial Sequence: synthetic DNA
tcgagggtaagcctatccctaaccctctcctcggtctcgattctacgcgtaccggtcatcatcaccatcaccattgagcatg

SEQ ID NO: 1775 - DNA, 74 bp, Artificial Sequence
  Description of Artificial Sequence: synthetic DNA
ctcaatggtgatggtgatgatgaccggtacgcgtagaatcgagaccgaggagagggttagggataggcttaccc

SEQ ID NO: 1776 - DNA, 70 bp, Artificial Sequence
  Description of Artificial Sequence: synthetic DNA
atggaatctgtttcttctttgtttaatattttttctactattatggttaattataaatctttggttttgg

SEQ ID NO: 1777 - DNA, 70 bp, Artificial Sequence
  Description of Artificial Sequence: synthetic DNA
ggaattcctgcagcccgggcaaattagaaacagacaacaaagccaaaaccaaagatttataattaaccat

SEQ ID NO: 1778 - DNA, 24 bp, Artificial Sequence
  Description of Artificial Sequence: primer
atggaatctgtttcttctttgttt

SEQ ID NO: 1779 - DNA, 59 bp, Artificial Sequence
  Description of Artificial Sequence: primer
ggaattcctgcagcccgggacctctagcatatttcaaattagaaacagacaacaaagcc

SEQ ID NO: 1780 - DNA, 30 bp, Artificial Sequence
  Description of Artificial Sequence: primer
aaatacaacaatggaatctgtttcttcttt

SEQ ID NO: 1781 - DNA, 30 bp, Artificial Sequence
  Description of Artificial Sequence: primer
gacagtcctgacctctagcatatttcaaat

SEQ ID NO: 1782 - DNA, 50 bp, Artificial Sequence
  Description of Artificial Sequence: primer
ttcgataatctcaaacaaacaactcaaaacaaaaaaaactaaatacaaca

SEQ ID NO: 1783 - DNA, 50 bp, Artificial Sequence
  Description of Artificial Sequence: primer
caggaagttggaactgtgtttggtggatcaggttcgtaaggacagtcctg

SEQ ID NO: 1784 - DNA, 59 bp, Artificial Sequence
  Description of Artificial Sequence: primer
atttaatccaaataaaattcaaacaaaaaccaaaactaaccagctgaagcttcgtacgc

SEQ ID NO: 1785 - DNA, 62 bp, Artificial Sequence
  Description of Artificial Sequence: primer
ggcagaaaaggatagggcggagaagtaagaaaagtttagcgcataggccactagtggatctg

SEQ ID NO: 1786 - DNA, 59 bp, Artificial Sequence
  Description of Artificial Sequence: primer
caataaaaaaacaaactaaacctaattctaacaagcaaagcagctgaagcttcgtacgc

SEQ ID NO: 1787 - DNA, 62 bp, Artificial Sequence
  Description of Artificial Sequence: primer
aagaaaaaaaaaagcagctgaaatttttctaaatgaagaagcataggccactagtggatctg

SEQ ID NO: 1788 - DNA, 1536 bp, Homo sapiens
  CDS (1)..(1536)
atgaagttctttctgttgcttttcaccattgggttctgctgggctcagtattccccaaatacacaacaaggacggacatctattgttcatctgtttgaatggcgatgggttgatattgctcttgaatgtgagcgatatttagctccgaagggatttggaggggttcaggtctctccaccaaatgaaaatgttgcaatttacaaccctttcagaccttggtgggaaagataccaaccagttagctataaattatgcacaagatctggaaatgaagatgaatttagaaacatggtgactagatgtaacaatgttggggttcgtatttatgtggatgctgtaattaatcatatgtgtggtaacgctgtgagtgcaggaacaagcagtacctgtggaagttacttcaaccctggaagtagggactttccagcagtcccatattctggatgggatttcaatgatggtaaatgtaaaactggaagtggagatatcgagaactacaatgatgctactcaggtcagagattgtcgtctgactggtcttcttgatcttgcactggagaaggattacgtgcgttctaagattgccgaatatatgaaccatctcattgacattggtgttgcagggttcagacttgatgcttccaagcacatgtggcctggagacataaaggcaattttggacaaactgcataatctaaacagtaactggttccctgcaggaagtaaacctttcatttaccaggaggtaattgatctgggtggtgagccaattaaaagcagtgactactttggtaatggccgggtgacagaattcaagtatggtgcaaaactcggcacagttattcgcaagtggaatggagagaagatgtcttacttaaagaactggggagaaggttggggtttcgtaccttctgacagagcgcttgtctttgtggataaccatgacaatcaacgaggacatggggctggaggagcctctattcttaccttctgggatgctaggctgtacaaaatggcagttggatttatgcttgctcatccttacggatttacacgagtaatgtcaagctaccgttggccaagacagtttcaaaatggaaacgatgttaatgattgggttgggccaccaaataataatggagtaattaaagaagttactattaatccagacactacttgtggcaatgactgggtctgtgaacatcgatggcgccaaataaggaacatggttattttccgcaatgtagtggatggccagccttttacaaattggtatgataatgggagcaaccaagtggcttttgggagaggaaacagaggattcattgttttcaacaatgatgactggtcattttctttaactttgcaaactggtcttcctgctggcacatactgtgatgtcatttctggagataaaattaatggcaattgcacaggcattaaaatttacgtttctgatgatggcaaagctcatttttctattagtaactctgctgaagatccatttattgcaattcatgctgaatctaaattgtaa

SEQ ID NO: 1789 - protein, 511 aa, Homo sapiens
MKFFLLLFTIGFCWAQYSPNTQQGRTSIVHLFEWRWVDIALECERYLAPKGFGGVQVSPPNENVAIYNPFRPWWERYQPVSYKLCTRSGNEDEFRNMVTRCNNVGVRIYVDAVINHMCGNAVSAGTSSTCGSYFNPGSRDFPAVPYSGWDFNDGKCKTGSGDIENYNDATQVRDCRLTGLLDLALEKDYVRSKIAEYMNHLIDIGVAGFRLDASKHMWPGDIKAILDKLHNLNSNWFPAGSKPFIYQEVIDLGGEPIKSSDYFGNGRVTEFKYGAKLGTVIRKWNGEKMSYLKNWGEGWGFVPSDRALVFVDNHDNQRGHGAGGASILTFWDARLYKMAVGFMLAHPYGFTRVMSSYRWPRQFQNGNDVNDWVGPPNNNGVIKEVTINPDTTCGNDWVCEHRWRQIRNMVIFRNVVDGQPFTNWYDNGSNQVAFGRGNRGFIVFNNDDWSFSLTLQTGLPAGTYCDVISGDKINGNCTGIKIYVSDDGKAHFSISNSAEDPFIAIHAESKL

SEQ ID NO: 1790 - DNA, 26 bp, Artificial Sequence
  Description of Artificial Sequence: primer
atgatgaaggaatcgaaatctatcac

SEQ ID NO: 1791 - DNA, 24 bp, Artificial Sequence
  Description of Artificial Sequence: primer
gggggtcaaatcgtttccgaccat

SEQ ID NO: 1792 - DNA, 28 bp, Artificial Sequence
  Description of Artificial Sequence: primer
atggtctcattgaaaataaaaaaaattt

SEQ ID NO: 1793 - DNA, 22 bp, Artificial Sequence
  Description of Artificial Sequence: primer
gggttgcgttgtcgtcgtcaca

SEQ ID NO: 1794 - DNA, 20 bp, Artificial Sequence
  Description of Artificial Sequence: primer
atgcagtttccattcgcttg

SEQ ID NO: 1795 - DNA, 26 bp, Artificial Sequence
  Description of Artificial Sequence: primer
gggtgacacagaagtctgggaagtgg

SEQ ID NO: 1796 - DNA, 24 bp, Artificial Sequence
  Description of Artificial Sequence: primer
atgggaaatatgataaagaaggca

SEQ ID NO: 1797 - DNA, 29 bp, Artificial Sequence
  Description of Artificial Sequence: primer
gggagacttcaaatgtgaagaactcccag

SEQ ID NO: 1798 - DNA, 28 bp, Artificial Sequence
  Description of Artificial Sequence: primer
atggctttacatcaatttgactatattt

SEQ ID NO: 1799 - DNA, 27 bp, Artificial Sequence
  Description of Artificial Sequence: primer
gggagatctagaagagatcgacgacgc

SEQ ID NO: 1800 - DNA, 22 bp, Artificial Sequence
  Description of Artificial Sequence: primer
atggtgcgttttgtttcaattt

SEQ ID NO: 1801 - DNA, 25 bp, Artificial Sequence
  Description of Artificial Sequence: primer
gggagacctattcccagcctgtgta

SEQ ID NO: 1802 - DNA, 28 bp, Artificial Sequence
  Description of Artificial Sequence: primer
atgacagcagctaataagaatattgtct

SEQ ID NO: 1803 - DNA, 23 bp, Artificial Sequence
  Description of Artificial Sequence: primer
gggagatttcgacccagcctgca

SEQ ID NO: 1804 - DNA, 21 bp, Artificial Sequence
  Description of Artificial Sequence: primer
atgcaattcaagaacgctttg

SEQ ID NO: 1805 - DNA, 26 bp, Artificial Sequence
  Description of Artificial Sequence: primer
ggggattttcttgatagagtcagcgg

SEQ ID NO: 1806 - DNA, 23 bp, Artificial Sequence
  Description of Artificial Sequence: primer
atgtttgttcatcgtctctggac

SEQ ID NO: 1807 - DNA, 25 bp, Artificial Sequence
  Description of Artificial Sequence: primer
gggatcatcagaggcatcttccaac

SEQ ID NO: 1808 - DNA, 25 bp, Artificial Sequence
  Description of Artificial Sequence: primer
atgaaattctctactctctccaccg

SEQ ID NO: 1809 - DNA, 24 bp, Artificial Sequence
  Description of Artificial Sequence: primer
gggtgtgctgatctcatgggtggt

SEQ ID NO: 1810 - DNA, 22 bp, Artificial Sequence
  Description of Artificial Sequence: primer
atgttgcgacttttttcactgg

SEQ ID NO: 1811 - DNA, 23 bp, Artificial Sequence
  Description of Artificial Sequence: primer
gggtgctataccaaatcccacgg

SEQ ID NO: 1812 - DNA, 28 bp, Artificial Sequence
  Description of Artificial Sequence: primer
atgtctagcaaatggtttaatgctatac

SEQ ID NO: 1813 - DNA, 28 bp, Artificial Sequence
  Description of Artificial Sequence: primer
gggccctttctttaccaacatagcattt

SEQ ID NO: 1814 - DNA, 24 bp, Artificial Sequence
  Description of Artificial Sequence: primer
atgaagttgcagagtttgttggtt

SEQ ID NO: 1815 - DNA, 27 bp, Artificial Sequence
  Description of Artificial Sequence: primer
gggctccttggtgtatgcatctctttt

SEQ ID NO: 1816 - DNA, 20 bp, Artificial Sequence
  Description of Artificial Sequence: primer
atgaaattcacatcagtgct

SEQ ID NO: 1817 - DNA, 23 bp, Artificial Sequence
  Description of Artificial Sequence: primer
gggggaagacgattcgctttgta

SEQ ID NO: 1818 - DNA, 23 bp, Artificial Sequence
  Description of Artificial Sequence: primer
atgaaattctccactgctttgtc

SEQ ID NO: 1819 - DNA, 25 bp, Artificial Sequence
  Description of Artificial Sequence: primer
gggatcgctctcagaaccttctttg

SEQ ID NO: 1820 - DNA, 21 bp, Artificial Sequence
  Description of Artificial Sequence: primer
atgaagttttctgctggtgcc

SEQ ID NO: 1821 - DNA, 27 bp, Artificial Sequence
  Description of Artificial Sequence: primer
ggggtcgtgcgactgaatgtactcatt

SEQ ID NO: 1822 - DNA, 25 bp, Artificial Sequence
  Description of Artificial Sequence: primer
cagtattccccaaatacacaacaag

SEQ ID NO: 1823 - DNA, 37 bp, Artificial Sequence
  Description of Artificial Sequence: primer
gcgcctcgagttacaatttagattcagcatgaattgc

SEQ ID NO: 1824 - DNA, 28 bp, Artificial Sequence
  Description of Artificial Sequence: primer
gggcagtattccccaaatacacaacaag

SEQ ID NO: 1825 - DNA, 26 bp, Artificial Sequence
  Description of Artificial Sequence: primer
atgagatttccttcaatttttactgc

SEQ ID NO: 1826 - DNA, 25 bp, Artificial Sequence
  Description of Artificial Sequence: primer
gggagcttcagcctctcttttctcg
